(19) United States
(12) Patent Application Publication
(10) Pub. No.: US 2019/0382751 A1
(43) Pub. Date: Dec. 19, 2019

(54) MODIFIED CRISPR RNA AND USES THEREOF

(71) Applicants: Ionis Pharmaceuticals, Inc., Carlsbad, CA (US); Ludwig Institute for Cancer Research, New York, NY (US)

(72) Inventors: Meghdad Radhar, Cardiff by the Sea, CA (US); Thazha P. Prakash, Carlsbad, CA (US); Eric E. Swayze, Encinitas, CA (US); C. Frank Bennett, Carlsbad, CA (US); Moira A. McMahon, Cardiff by the Sea, CA (US)

(73) Assignees: Ionis Pharmaceuticals, Inc., Carlsbad, CA (US); Ludwig Institute for Cancer Research, New York, NY (US)

(21) Appl. No.: 16/470,464

(22) PCT Filed: Dec. 28, 2017
(86) PCT No.: PCT/US17/68642

§ 371 Date: Jun. 17, 2019

Related U.S. Application Data
(60) Provisional application No. 62/439,828, filed on Dec. 28, 2016.
(60) Provisional application No. 62/491,818, filed on Apr. 28, 2017.
(60) Provisional application No. 62/572,361, filed on Oct. 13, 2017.

(51) Int. Cl. C12N 15/10; C12N 15/11

(52) U.S. Cl. CPC C12N 15/102; C12N 15/111; C12N 2310/20; C12N 2310/321; C12N 2310/315; C12N 2310/3533; C12N 2310/346; C12N 2320/51; C12N 2310/3521; C12N 2310/322; C12N 2310/3231

(57) ABSTRACT

The present disclosure provides compounds comprising modified oligonucleotides for use in CRISPR. In certain embodiments, such modified oligonucleotides provide improved properties of crRNA.

### SEQUENCE LISTING

[0001] The present application is being filed along with a Sequence Listing in electronic format. The Sequence Listing is provided as a file entitled CORE0141WOSEQ_ST25.txt, created on Dec. 15, 2017, which is 948 Kb in size. The information in the electronic format of the sequence listing is incorporated herein by reference in its entirety.

### BACKGROUND

[0002] Use of Cluster Regulatory Interspaced Short Palindromic Repeats (CRISPR) to edit or disable genes has been described. See for example Jinek et al., Science 337: 816-821 (2012); Mali et al. Science 339: 823-826 (2013).

### SUMMARY

[0003] Various CRISPR systems have been described. See for example: WO2013/176772; WO2015/006747; Qi et al., Cell 152: 1 173-1 (2013); Gilbert et al., Cell 154: 1-10 (2013) Jinek et al., Science 337: 816-821 (2012); Mali et al. Science 339: 823-826 (2013); Doudna et al., Science 346: 6213 (2014). See also for example: Zetsche et al., Cell 163: 1-13 (2015). The present invention provides modified oligonucleotides for use as crRNA in CRISPR systems. In certain embodiments, such modified crRNA have improved stability relative to unmodified crRNA. In certain embodiments, modified crRNA is stabilized at the 5′ end and/or the 3′. In certain embodiments, such stabilized crRNA is resistant to exonuclease and/or endonucleoase digestion. In certain embodiments, modified crRNA have improved affinity for target DNA or RNA relative to unmodified crRNA. In certain embodiments, modified crRNA have improved selectivity for target DNA or RNA relative to unmodified crRNA. In certain embodiments, modified crRNA have improved cellular uptake relative to unmodified crRNA. In certain embodiments, modified crRNA increase gene editing activity of a CRISPR system relative to unmodified crRNA.

[0004] In certain embodiments, the crRNA modifications increase affinity for the target DNA or RNA allowing the modified crRNA to be shortened while retaining sufficient affinity to hybridize to target DNA or RNA and/or associate with other CRISPR system components. Thus, in certain embodiments, modified crRNA is shorter than unmodified crRNA. In certain embodiments, modified crRNA is 35-45 linked nucleosides in length. In certain embodiments, modified crRNA is 35-43 linked nucleosides in length. In certain embodiments, modified crRNA is 35-42 linked nucleosides in length. In certain embodiments, modified crRNA is 36-43 linked nucleosides in length. In certain embodiments, modified crRNA is 36-42 linked nucleosides in length. In certain embodiments, modified crRNA is 36-40 linked nucleosides in length. In certain embodiments, the target recognition portion of modified crRNA is 15-23 linked nucleosides in length. In certain embodiments, the target recognition portion of modified crRNA is 15-22 linked nucleosides in length. In certain embodiments, the target recognition portion of modified crRNA is 16-22 linked nucleosides in length. In certain embodiments, the target recognition portion of modified crRNA is 17-22 linked nucleosides in length. In certain embodiments, the target recognition portion of modified crRNA is 18-22 linked nucleosides in length. In certain embodiments, the target recognition portion of modified crRNA is 16-20 linked nucleosides in length. In certain embodiments, the target recognition portion of modified crRNA is 18-20 linked nucleosides in length. In certain embodiments, the CRISPR recognition portion of modified crRNA is 17-20 linked nucleosides in length. In certain embodiments, the CRISPR recognition portion of modified crRNA is 18-20 linked nucleosides in length. In certain embodiments, such shorter crRNA have improved uptake properties and/or are easier to synthesize than longer crRNA. In certain embodiments, modified crRNA are taken into cells without transfection reagents or electroporation. In certain such embodiments, the cells are in an animal. In certain embodiments, the animal expresses a CRISPR nuclease. In certain embodiments, the animal is previously or concomitantly treated with a means of expressing a CRISPR nuclease. In certain such embodiments, such treatment comprises administration of a vector for delivering a CRISPR nuclease. In certain such embodiments, such vector is a viral vector, for example adeno-associated virus (AAV). In certain such embodiments, the viral vector expresses a bacterial derived CRISPR nuclease that fits into an AAV vector. In certain embodiments, the CRISPR nuclease is a Cpf1 nuclease.

[0005] In certain embodiments, the CRISPR system is inhibited after the target gene is edited. In certain such embodiments, the modified crRNA inside a cell is degraded after the target gene has been edited. In certain such embodiments, the CRISPR nuclease continues to be expressed in the cell but is no longer active because it requires crRNA in order to exhibit nuclease activity. In certain such embodiments, off-target effects of the CRISPR system, such as undesired cleavage of an off-target gene, are decreased relative to a CRISPR system in which all of the components necessary for nuclease activity continue to be expressed indefinitely, e.g. by a viral vector. In certain such embodiments, degradation of the modified crRNA is facilitated by hybridization to an oligonucleotide complementary to the crRNA. In certain embodiments, degradation of the modified crRNA is facilitated by nucleases present in the cell.

[0006] In certain embodiments, the CRISPR system is inhibited after the target gene is edited via degradation of a tracrRNA inside the cell. In certain such embodiments, degradation of the tracrRNA is facilitated by hybridization to an oligonucleotide complementary to the tracrRNA. In certain embodiments, degradation of the tracrRNA is facilitated by nucleases present in the cell.

[0007] In certain embodiments, the CRISPR system is inhibited after the target gene is edited via inhibition of the expression of the CRISPR nuclease. In certain such embodiments, the nuclease gene is edited by a modified crRNA. In certain embodiments, the nuclease transcript is degraded following hybridization of the nuclease transcript to an oligonucleotide complementary to the nuclease transcript.

### BRIEF DESCRIPTION OF FIGURES

[0008] FIG. 1 shows a gel that illustrates the extent of gene editing of DNMT1 by modified crRNAs described in Example 12.

### DETAILED DESCRIPTION

[0009] It is to be understood that both the foregoing general description and the following detailed description are exemplary and explanatory only and are not restrictive of the invention, as claimed. Herein, the use of the singular includes the plural unless specifically stated otherwise. As used herein, the use of “or” means “and/or” unless stated otherwise. Furthermore, the use of the term “including” as well as other forms, such as “includes” and “included”, is not limiting. Also, terms such as “element” or “component” encompass both elements and components comprising one unit and elements and components that comprise more than one subunit, unless specifically stated otherwise.

[0010] The section headings used herein are for organizational purposes only and are not to be construed as limiting the subject matter described. All documents, or portions of documents, cited in this application, including, but not limited to, patents, patent applications, articles, books, and treatises, are hereby expressly incorporated by reference in their entirety for any purpose.

### Definitions

[0011] Unless otherwise indicated, the following terms have the following meanings:

[0012] As used herein, “2′-deoxynucleoside” means a nucleoside comprising 2′-H(H) furanosyl sugar moiety, as found in naturally occurring deoxyribonucleic acids (DNA). In a crRNA, a 2′-deoxynucleoside is a modified nucleoside.

[0013] As used herein, “2′-substituted nucleoside” or “2-modified nucleoside” means a nucleoside comprising a 2′-substituted or 2′-modified sugar moiety. As used herein, “2′-substituted” or “2-modified” in reference to a sugar moiety in a crRNA means a furanosyl sugar moiety comprising a 2′-substituent group in place of the 2′-OH of an unmodified sugar moiety.

[0014] As used herein, “3′-stabilized” in reference to a modified oligonucleotide means a modified oligonucleotide that comprises at least one stabilizing modification or is connected to a stabilizing conjugate group, wherein the at least one modification and/or the conjugate group increases the stability of the 3′-terminus of the modified oligonucleotide in cells or in an animal relative to a corresponding oligonucleotide that does not comprise the at least one stabilizing modification or is not connected to the stabilizing conjugate group. In certain embodiments, modified crRNAs are 3′-stabilized. In certain such embodiments, the 3′-terminal nucleoside of the modified crRNA comprises the stabilizing modification. In certain embodiments, the 3′-terminal internucleoside linkage of the crRNA comprises the stabilizing modification.

[0015] As used herein, “5′-stabilized” in reference to a modified oligonucleotide means a modified oligonucleotide that comprises at least one stabilizing modification or is connected to a stabilizing conjugate group, wherein the at least one modification and/or the conjugate group increases the stability of the 5′-terminus of the modified oligonucleotide in cells or in an animal relative to a corresponding oligonucleotide that does not comprise the at least one stabilizing modification or is not connected to the stabilizing conjugate group. In certain embodiments, modified crRNAs are 5′-stabilized. In certain such embodiments, the 5′-terminal nucleoside of the modified crRNA comprises the stabilizing modification. In certain such embodiments, the 5′-terminal nucleoside of the modified crRNA is a linker nucleoside.

[0016] As used herein, “bicyclic nucleoside” or “BNA” means a nucleoside comprising a bicyclic sugar moiety. As used herein, “bicyclic sugar” or “bicyclic sugar moiety” means a modified sugar moiety comprising two rings, wherein the second ring is formed via a bridge connecting two of the atoms in the first ring thereby forming a bicyclic structure. In certain embodiments, the first ring of the bicyclic sugar moiety is a furanosyl moiety. In certain embodiments, the bicyclic sugar moiety does not comprise a furanosyl moiety.

[0017] As used herein, “cell-targeting moiety” means a conjugate group or portion of a conjugate group that is capable of binding to a particular cell type or particular cell types.

[0018] As used herein, “complementary” in reference to an oligonucleotide means the nucleobase sequence of such oligonucleotide or one or more regions thereof matches the nucleobase sequence of another oligonucleotide or nucleic acid or one or more regions thereof when the two nucleobase sequences are aligned in opposing directions. Nucleobase matches or complementary nucleobases, as described herein, are limited to adenine (A) and thymine (T), adenine (A) and uracil (U), cytosine (C) and guanine (G), and 5-methyl cytosine (^{m}C) and guanine (G) unless otherwise specified. Complementary oligonucleotides and/or nucleic acids need not have nucleobase complementarity at each nucleoside. Rather, some mismatches are tolerated. As used herein, “fully complementary” or “100% complementary” in reference to oligonucleotides means that such oligonucleotides are complementary to another oligonucleotide or nucleic acid at each nucleoside. In such embodiments, mismatches are not tolerated.

[0019] As used herein, “conjugate group” means a group of atoms that is directly or indirectly attached to a parent compound, e.g., an oligonucleotide.

[0020] As used herein, “conjugate linker” means a group of atoms that connects a conjugate group to a parent compound, e.g., an oligonucleotide.

[0021] As used herein, “contiguous” in the context of an oligonucleotide refers to nucleosides, nucleobases, sugar moieties, or internucleoside linkages that are immediately adjacent to each other. For example, “contiguous nucleobases” means nucleobases that are immediately adjacent to each other

[0022] As used herein, “crRNA” or “CRISPR RNA” means an oligonucleotide that comprises a target recognition portion and a CRISPR recognition portion. As used herein, a “target recognition portion” is a portion of an oligonucleotide with a nucleobase sequence that is complementary to a DNA or RNA target. As used herein, “CRISPR recognition portion” is a portion of an oligonucleotide that can bind to, associate with, or contribute to the binding or association with a CRISPR nuclease or a molecule that binds to or associates with a CRISPR nuclease. The CRISPR recognition portion of a crRNA is not complementary to the DNA or RNA target of the target recognition portion of the crRNA. Thus, although the target recognition portion of a crRNA may associate with a CRISPR nuclease, the target recognition and CRISPR recognition portions of a crRNA do not overlap. A CRISPR nuclease is a protein that directly or indirectly associates with a crRNA and cleaves the target DNA or RNA. In certain embodiments, the CRISPR nuclease is a Cpf1 nuclease. In certain such embodiments, the CRISPR recognition portion of a crRNA binds to or associates with a Cpf1 nuclease. In certain embodiments, the CRISPR recognition portion of a crRNA binds to or associates with a tracrRNA. In certain embodiments, crRNAs comprise a self-complementary region. In certain such embodiments, the CRISPR recognition portion partially or completely overlaps with the self-complementary region. In certain embodiments, crRNAs comprise one or more linker nucleosides.

[0023] As used herein, “linker nucleosides” in the context of a crRNA means one or more nucleosides that are linked to the target recognition portion and/or the CRISPR recognition portion of a crRNA. Linker nucleosides are not part of either the target recognition portion or the CRISPR recognition portion of the crRNA. In certain embodiments, such linker nucleosides are located at the 5′-terminus of a crRNA, the 3′-terminus of the crRNA, and/or in between the target recognition and CRISPR recognition portions of a crRNA.

[0024] As used herein, “fully modified” in reference to an oligonucleotide means a modified oligonucleotide in which each sugar moiety is modified. “Uniformly modified” in reference to an oligonucleotide means a fully modified oligonucleotide in which each at least one modification of each sugar moiety is the same. For example, the nucleosides of a uniformly modified oligonucleotide can each have a 2′-MOE modification but different nucleobase modifications, and the internucleoside linkages may be different.

[0025] As used herein, “gene editing” means any process mediated by a complex comprising a CRISPR nuclease and a modified or unmodified crRNA, including but not limited to gene knock-down, gene knock-out, gene disruption, deletion, insertion, and gene activation.

[0026] As used herein, “hybridization” means the pairing or annealing of complementary oligonucleotides and/or nucleic acids. While not limited to a particular mechanism, the most common mechanism of hybridization involves hydrogen bonding, which may be Watson-Crick, Hoogsteen or reversed Hoogsteen hydrogen bonding, between complementary nucleobases.

[0027] As used herein, “increases”, when used in reference to an effect mediated by a modified oligonucleotide, means that the effect is greater in the presence of the oligonucleotide containing a certain modification than the effect is in the presence of a corresponding oligonucleotide that does not contain the certain modification.

[0028] As used herein, the terms “internucleoside linkage” means a group that forms a covalent linkage between adjacent nucleosides in an oligonucleotide. As used herein “modified internucleoside linkage” means any internucleoside linkage other than a naturally occurring, phosphate internucleoside linkage. Naturally occurring, non-phosphate linkages are referred to herein as modified internucleoside linkages. “Phosphorothioate linkage” means a linkage between nucleosides wherein the phosphodiester bond of a phosphate linkage is modified by replacing one of the non-bridging oxygen atoms with a sulfur atom. A phosphorothioate linkage is a modified internucleoside linkage.

[0029] As used herein, “linearly modified sugar” or “linearly modified sugar moiety” means a modified sugar moiety that comprises an acyclic or non-bridging modification. Such linear modifications are distinct from bicyclic sugar modifications.

[0030] As used herein, “linked nucleosides” are nucleosides that are connected in a continuous sequence (i.e. no additional nucleosides are present between those that are linked) and are linked by internucleoside linkages.

[0031] As used herein, “mismatch” or means a nucleobase of a first oligonucleotide that is not capable of pairing with the corresponding nucleobase of a second oligonucleotide or target nucleic acid when the first and second oligomeric compound are aligned.

[0032] As used herein, “MOE” means methoxyethyl. “2′-MOE” means a —OCH₂CH₂OCH₃ group at the 2′ position of a furanosyl ring.

[0033] As used herein, “motif” means the pattern of unmodified and/or modified sugar moieties, nucleobases, and/or internucleoside linkages, in an oligonucleotide.

[0034] As used herein, “naturally occurring” means found in nature.

[0035] As used herein, “nucleobase” means a heterocyclic moiety capable of pairing with a second, different nucleobase. As used herein, “nucleobase sequence” means the order of contiguous nucleobases independent of any sugar or internucleoside linkage modification. As used herein, “modified nucleobase” means a nucleobase other than adenine (A), thymine (T), cytosine (C), uracil (U), and guanine (G), herein defined as the five, unmodified nucleobases. A universal base is a nucleobase that can pair with any one of the five unmodified nucleobases.

[0036] As used herein, “nucleoside” means a compound comprising a nucleobase and a sugar moiety. The nucleobase and sugar moiety are each, independently, unmodified or modified. As used herein, “modified nucleoside” means a nucleoside comprising a modified nucleobase and/or a modified sugar moiety. Modified nucleosides include abasic nucleosides.

[0037] As used herein, “oligonucleotide” means a strand of linked nucleosides connected via internucleoside linkages, wherein each nucleoside and internucleoside linkage may be modified or unmodified. Unless otherwise indicated, oligonucleotides consist of 8-50 linked nucleosides. As used herein, “modified oligonucleotide” means an oligonucleotide, wherein at least one nucleoside or internucleoside linkage is modified. As used herein, “unmodified oligonucleotide” means an oligonucleotide that does not comprise any nucleoside modifications or internucleoside modifications.

[0038] As used herein, “pharmaceutically acceptable carrier or diluent” means any substance suitable for use in administering to an animal. Certain such carriers enable pharmaceutical compositions to be formulated as, for example, tablets, pills, dragees, capsules, liquids, gels, syrups, slurries, suspension and lozenges for the oral ingestion by a subject.

[0039] As used herein “pharmaceutically acceptable salts” means physiologically and pharmaceutically acceptable salts of compounds, such as oligomeric compounds, i.e., salts that retain the desired biological activity of the parent compound and do not impart undesired toxicological effects thereto.

[0040] As used herein “pharmaceutical composition” means a mixture of substances suitable for administering to a subject. For example, a pharmaceutical composition may comprise an crRNA compound and a sterile aqueous solution. In certain embodiments, a pharmaceutical composition shows activity in free uptake assay in certain cell lines.

[0041] As used herein, “phosphorus moiety” means a group of atoms comprising a phosphorus atom. In certain embodiments, a phosphorus moiety comprises a mono-, di-, or tri-phosphate, or phosphorothioate.

[0042] As used herein “prodrug” means a therapeutic agent in an inactive form that is converted to an active form within the body or cells thereof by the action of endogenous enzymes or other chemicals and/or physiologic conditions.

[0043] As used herein, “self-complementary” in reference to an oligonucleotide means an oligonucleotide that is at least partially complementary to itself. In certain embodiments, a self-complementary oligonucleotide forms a hairpin when a portion of the self-complementary oligonucleotide hybridizes to itself.

[0044] As used herein, “sugar moiety” means a group of atoms that can link a nucleobase to another group, such as an internucleoside linkage, conjugate group, or terminal group. In certain embodiments, a sugar moiety is attached to a nucleobase to form a nucleoside. As used herein, “unmodified sugar moiety” in the context of crRNA means a 2′-OH(H) furanosyl moiety, as found in RNA. Unmodified sugar moieties have one hydrogen at each of the 1′, 3′, and 4′ positions, an oxygen at the 3′ position, and two hydrogens at the 5′ position. As used herein, “modified sugar moiety” or “modified sugar” means a sugar surrogate or a furanosyl moiety comprising any substitution relative to an unmodified sugar moiety. In certain embodiments, a modified sugar moiety is a 2′-substituted sugar moiety. Such modified sugar moieties include bicyclic sugars and linearly modified sugars.

[0045] As used herein, “sugar surrogate” means a modified sugar moiety having other than a furanosyl moiety that can link a nucleobase to another group, such as an internucleoside linkage, conjugate group, or terminal group. Modified nucleosides comprising sugar surrogates can be incorporated into one or more positions within an oligonucleotide. In certain embodiments, such oligonucleotides are capable of hybridizing to complementary oligomeric compounds or nucleic acids.

[0046] As used herein, “target nucleic acid,” “target RNA”, “target DNA,” “target gene” and “nucleic acid target” mean a nucleic acid to which the target recognition portion of a crRNA is complementary. In certain such embodiments, a crRNA is designed to affect the target nucleic acid. An “off-target gene” is a gene that a crRNA is not designed to affect. In certain embodiments, the editing of an off-target gene is deleterious.

[0047] As used herein, “terminal group” means a chemical group or group of atoms that is covalently linked to a terminus of an oligonucleotide.

### CRISPR Systems and Certain Oligonucleotides for Use in CRISPR Systems

[0048] 1. Certain CRISPR RNA (crRNA)

[0049] In certain embodiments, the present invention provides modified oligonucleotides for use in CRISPR. Typically, CRISPR employs CRISPR RNA (crRNA), which hybridizes to target DNA or RNA and directly or indirectly recruits a nuclease that cleaves the target DNA or RNA. Thus, the crRNA in such systems has two functions: (1) recognition and hybridization to the target DNA or RNA and (2) recognition by a CRISPR nuclease or a molecule that recruits a CRISPR nuclease. Typically, in such systems, the crRNA comprises two portions which correspond to these two functions: a target recognition portion and a CRISPR recognition portion. The present invention provides modified oligonulcleotides that may be used as crRNA. Such modified oligonucleotides may have modifications in the target recognition portion and/or CRISPR recognition portion.

[0050] In certain embodiments, the CRISPR recognition portion of the crRNA comprises a portion of the direct repeat sequence from a bacterial organism that has a Cpf1 nuclease or a Cpf1 ortholog. In certain such embodiments, the CRISPR recognition portion of the crRNA comprises a sequence selected from the table below. In certain embodiments, the CRISPR recognition portion of the crRNA comprises 16, 17, 18, 19, or 20 nucleobases of a sequence selected from the table below. In certain embodiments, the CRISPR recognition portion of the crRNA consists of 16, 17, 18, 19, or 20 nucleobases of a sequence selected from the table below.

TABLE A
Direct repeat sequences used in CRISPR recognition portions of crRNA

| Organism | Sequence | SEQ ID NO. |
|---|---|---|
| Francisella novicida | UAAUUUCUACUGUUGUAGAU | 3 |
| Lachnospimceae bacterium MC2017 | AGAAAUGCAUGGUUCUCAUGC | 4 |
| Butyrivibrio proteoclasticus | AAAAUUACCUAGUAAUUAGGU | 5 |
| Peregrinibacteria bacterium | GGAUUUCUACUUUUGUAGAU | 6 |
| Parcubacteria bacterium | AAAUUUCUACUUUUGUAGAU | 7 |
| Smithella | GUUUCAAUCCACGCGCCCACGCGG | 8 |
| | GGCGCGAC | |
| Acidaminococcus | UAAUUUCUACUCUUGUAGAU | 9 |
| Lachnospimceae bacterium MA2020 | GAAUUUCUACUAUUGUAGAU | 10 |
| Candidatus Methanoplasma termitum | GAAUCUCUACUCUUUGUAGAU | 11 |
| Eubacterium eligens | UAAUUUCUACUUUGUAGAU | 12 |
| Moraxella bovoculi | AAAUUUCUACUGUUUGUAGAU | 13 |
| Leptospim inadai | GAAUUUCUACUUUUGUAGAU | 14 |
| Lachnospiraceae bacterium ND2006 | UAAUUUCUACUAAGUGUAGAU | 15 |
| Polphyromonas crevioricanis | UAAUUUCUACUAUUGUAGAU | 16 |
| Prevotella disiens | UAAUUUCUACUUCGGUAGAU | 17 |
| Polphyromonas macacae | UAAUUUCUACUAUUGUAGAU | 16 |

[0051] In certain embodiments, the target recognition portion of the crRNA comprises a nucleobase sequence that is complementary to a target DNA. In certain such embodiments, the entire nucleobase sequence of the target recognition portion is complementary to a target DNA. In certain embodiments, the nucleobase sequence of the target recognition portion is at least 80%, at least 85%, at least 90%, at least 95%, or 100% complementary to a target DNA. In certain embodiments, the target DNA is a DNMT1 gene. In certain embodiments, the nucleobase sequence of the target DNMT1 gene is GENBANK Accession Number NT_011295.10 truncated from nucleobases 1506424 to 1569013, herein referred to as SEQ ID NO: 66. In certain embodiments, the target DNA is a GRIN2B gene. In certain embodiments, the nucleobase sequence of the target GRIN2B gene is GENBANK Accession Number NC_000012.12 truncated from nucleobases 13534001 to 13985000, herein referred to as SEQ ID NO: 67. In certain embodiments, the target DNA is a LDLR gene. In certain embodiments, the nucleobase sequence of the target LDLR gene is GENBANK Accession Number NC_000019.10 truncated from nucleobases 11086001 to 11137000, herein referred to as SEQ ID NO: 68. In certain embodiments, the target DNA is a complement component 5 (C5) gene. In certain embodiments, the nucleobase sequence of the target C5 gene is GENBANK Accession Number NC_000009.12 truncated from nucleobases 120949001 to 12078000, herein referred to as SEQ ID NO: 69. In certain embodiments, the target DNA is an empty spiracles homolog1 (EMX1) gene. In certain embodiments, the nucleobase sequence of the target EMX1 gene is GENBANK Accession Number NC_000002.12 truncated from nucleobases 72908001 to 72940000, herein referred to as SEQ ID NO: 70.

[0052] In certain embodiments, modified crRNA comprises a target recognition portion, a CRISPR recognition portion, and linker nucleosides. The linker nucleosides are not part of the target recognition or CRISPR recognition portions of the crRNA. In certain embodiments, linker nucleosides are modified in order to provide nuclease stability. In certain such embodiments, the linker nucleosides provide exonuclease stability. In certain embodiments, modified crRNA contain no linker nucleosides. In certain embodiments, modified crRNA comprise 2 linker nucleosides.

[0053] In certain embodiments, modified crRNA comprise a CRISPR recognition portion, a target recognition portion, and optional, one or more linker nucleosides. The CRISPR recognition and target recognition portions and the optional linker nucleosides may be in any orientation relative to each other, as shown below, wherein “CR” is the CRISPR recognition portion, “Ta” is the target recognition portion, and “Ln” is the linker nucleoside(s). In certain embodiments, modified crRNA are represented by one of the following formulas:

5′-CR-Ta-3′
5′-Ln-CR-Ta-3′
5′-CR-Ta-Ln-3′
5′-Ln-CR-Ta-Ln-3′
5′-CR-Ln-Ta-3′
5′-Ln-CR-Ln-Ta-3′
5′-Ln-CR-Ln-Ta-Ln-3′
5′-Ta-CR-3′
5′-Ta-CR-Ln-3′
5′-Ln-Ta-CR-3′
5′-Ln-Ta-CR-Ln-3′
5′-Ta-Ln-CR-Ln-3′
5′-Ta-Ln-CR-3′
5′-Ln-Ta-Ln-CR-Ln-3′

[0054] In certain embodiments, a compound comprising a modified crRNA comprises a conjugate group. In certain such embodiments, the conjugate group is connected to the 5′-terminus of the modified crRNA. In certain embodiments, the conjugate group is connected to the 3′-terminus of the modified crRNA. In certain embodiments, the conjugate group is connected to an internal nucleoside or internucleoside linkage of the modified crRNA.

[0055] In certain embodiments, the modified crRNA is 5′-stabilized and/or 3′-stabilized. In certain such embodiments, the 5′- or 3′-terminal nucleoside of the 5′- or 3′-stabilized crRNA comprises a stabilizing modification, respectively. In certain embodiments, the nucleoside comprising the stabilizing modification is the terminal nucleoside of the CRISPR recognition portion. In certain embodiments, the nucleoside comprising the stabilizing modification is the terminal nucleoside of the target recognition portion. In certain embodiments, the nucleoside comprising the stabilizing modification is a linker nucleoside. In certain embodiments, the 5′- or 3′-stabilized crRNA is connected to a stabilizing conjugate group at the 5′- or 3′-terminus, respectively. In certain such embodiments, the conjugate group does not comprise a cleavable moiety.

[0056] In certain embodiments, modified crRNAs comprise a modified oligonucleotide. In certain embodiments, modified crRNAs consist of a modified oligonucleotide. Modified oligonucleotides described herein are suitable for use as crRNA.

[0057] In certain embodiments, modified crRNAs comprise at least three of the following features:
[0058] a. two linker nucleosides linked to the 5′-end of the CRISPR recognition portion of the modified crRNA;
[0059] b. 1^{st}, 8^{th}, and/or 9^{th} nucleoside from the 5′-end of the target recognition portion of the modified crRNA independently comprising 2′-F or 2′-H(H) modified sugar moiety;
[0060] c. at least one terminal phosphorothioate internucleoside linkage at each of the 3′ and 5′ termini of the modified crRNA
[0061] d. each nucleoside of the CRISPR recognition portion comprising an unmodified sugar moiety
[0062] e. one to five 3′-terminal nucleosides of the modified crRNA comprising independently selected modified sugar moieities
   In certain such embodiments, the modified crRNA comprises features (b), (d), and (e). In certain embodiments, the modified crRNA comprises features (b), (c), and (e). In certain embodiments, the modified crRNA comprises features (b), (c), and (d). In certain embodiments, the modified crRNA comprises features (b), (c), (d) and (e). In certain embodiments, the modified crRNA comprises features (a), (b), and (e). In certain embodiments, the modified crRNA comprises features (a), (c), and (e). In certain embodiments, the modified crRNA comprises features (a), (b), and (d). In certain embodiments, the modified crRNA comprises features (a), (b), (d) and (e). In certain embodiments, the modified crRNA comprises features (a), (b), (c) and (e). In certain embodiments, the modified crRNA comprises features (a), (b), (c), (d), and (e).

[0063] In certain embodiments, modified crRNAs comprise at least three of the following features:
[0064] a. two linker nucleosides linked to the 5′-end of the CRISPR recognition portion of the modified crRNA;
[0065] b. 1^{st}, 8^{th} and/or 9^{th} nucleoside from the 5′-end of the target recognition portion of the modified crRNA independently comprising 2′-F or 2′-H(H) modified sugar moiety;
[0066] c. at least one terminal phosphorothioate internucleoside linkage at each of the 3′ and 5′ termini of the modified crRNA
[0067] d. at least one nucleoside at position 5, 6, 7, 8, 11, or 12 from the 3′-end of the CRISPR recognition portion comprises a modified sugar moiety
[0068] e. one to five 3′-terminal nucleosides of the modified crRNA comprising independently selected modified sugar moieities
   In certain such embodiments, the modified crRNA comprises features (b), (d), and (e). In certain embodiments, the modified crRNA comprises features (b), (c), and (e). In certain embodiments, the modified crRNA comprises features (b), (c), and (d). In certain embodiments, the modified crRNA comprises features (b), (c), (d) and (e). In certain embodiments, the modified crRNA comprises features (a), (b), and (e). In certain embodiments, the modified crRNA comprises features (a), (c), and (e). In certain embodiments, the modified crRNA comprises features (a), (b), and (d). In certain embodiments, the modified crRNA comprises features (a), (b), (d) and (e). In certain embodiments, the modified crRNA comprises features (a), (b), (c) and (e). In certain embodiments, the modified crRNA comprises features (a), (b), (c), (d), and (e).

[0069] In certain embodiments, the modified crRNA comprises any combination of features (a), (b), (c), (d), and (e) listed in the table below, wherein one selection is made for each of (a), (b), (c), (d), and (e).

TABLE B
Features of certain modified crRNAs

| | | (c) terminal | | (e) sugar |
|---|---|---|---|---|
| | (b) modifications | phosphorothioate | (d) sugar moieties | modifications of |
| (a) linker | of target | (PS)internucleoside | of CRISPR | 3′-terminal |
| nucleosides | recognition portion | linkages | recognition portion | nucleosides |
| Two modified | 2′-H(H) modified | Two PS linkages at | Each nucleoside of | The two 3′-terminal |
| linker nucleosides | nucleosides at | each terminus | CRISPR recognition | nucleosides |
| | positions 1, 8, and 9 | | portion comprises | comprise modified |
| | | | an unmodified sugar | sugar moieties |
| | | | moiety | |
| Two 2′-H(H) | 2′-H(H) modified | Two PS linkages at | N/A (at least one | The five 3′-terminal |
| modified linker | nucleosides at | 5′ terminus and six | nucleoside of | nucleosides |
| nucleosides | positions 1 and 8 | PS linakges at 3′- | CRISPR recognition | comprise modified |
| | | terminus | portion comprises a | sugar moieties |
| | | | modified sugar) | |
| Two 2′-OMe | 2′-H(H) modified | N/A (at least one | bicyclic modified | The two 3′-terminal |
| modified | linker | nucleosides at | terminus has a non- | nucleoside at nucleosides |
| nucleosides | positions 1, and 9 | PS terminal linkage) | position 11 from the | comprise 2′-OMe |
| | | | 3′-end of the | modified sugar |
| | | | CRISPR recognition | moieties |
| | | | portion | |
| Two cEt modified | 2′-H(H) modified | | bicyclic modified | The two 3′-terminal |
| linker nucleosides | nucleosides at | | nucleoside at | nucleosides |
| | positions 8, and 9 | | position 12 from the | comprise cEt |
| | | | 3′-end of the | modified sugar |
| | | | CRISPR recognition | moieties |
| | | | portion | |
| One modified linker | 2′-H(H) modified | | bicyclic modified | The five 3′-terminal |
| nucleoside and one | nucleoside at | | nucleosides at | nucleosides |
| unmodified linker | position 1 | | positions 11 and 12 | comprise 2′-0Me |
| nucleoside | | | from | the 3′-end of |
| | | | the CRISPR | modified sugar |
| | | | recognition portion | moieties |
| One 2′-OMe | N/A (No modified | | | The five 3′-terminal |
| modified linker | nucleosides at any | | | nucleosides |
| nucleoside and one | of positions 1, 8, or | | | comprise 2′-F |
| unmodified linker | 9) | | | modified sugar |
| nucleoside | | | | moieties |
| One cEt modified | 2′-H(H) modified | | | N/A (The 3′- |
| linker nucleoside | nucleosides at | | | terminal nucleoside |
| and one unmodified | positions 14, 15, | | | comprises an |
| linker nucleoside | and 16 | | | unmodified sugar |
| | | | | moiety.) |
| N/A (zero or one | 2′-H(H) modified | | | |
| linker nucleosides) | nucleosides at | | | |
| | positions 14, 15, 16, | | | |
| | and at least one of | | | |
| | 1, 8, and 9 | | | |
| | 2′-F modified | | | |
| | nucleosides at | | | |
| | positions 1, 8, | | | |
| | and/or 9 | | | |
| | 2′-F modified | | | |
| | nucleosides at | | | |
| | positions 14, 15, | | | |
| | and/or 16 | | | |

[0070] Certain modified oligonucleotides have one or more asymmetric center and thus give rise to enantiomers, diastereomers, and other stereoisomeric configurations that may be defined, in terms of absolute stereochemistry, as (R) or (S), as a or β such as for sugar anomers, or as (D) or (L) such as for amino acids etc. Included in the modified oligonucleotides provided herein are all such possible isomers, including their racemic and optically pure forms, unless specified otherwise. Likewise, all cis- and trans-isomers and tautomeric forms are also included.

[0071] In certain embodiments, such modified oligonucleotides may contain any combination of the modified sugar moieites, modified nucleobases, modified internucleoside linkages, motifs, and/or lengths described herein.

Certain Methods of Use Comprising Modified crRNA

[0072] In certain embodiments, methods comprising contacting a cell with a compound comprising a modified crRNA are in vitro methods. In certain embodiments, methods comprising contacting a cell with a compound comprising a modified crRNA are ex vivo methods. In certain embodiments, methods comprising contacting a cell with a compound comprising a modified crRNA are in vivo methods.

[0073] Various CRISPR nuclease variants, both naturally occurring and genetically engineered, can be used in the methods of the present invention. Such variants include but are not limited to inactive nuclease mutants that are used in applications that do not require target nucleic acid cleavage, such as gene activation; and truncated nuclease variants that are suitable for expression in certain vectors, such as AAV vectors. In certain such embodiments, the CRISPR nuclease variant is a Cpf1 nuclease variant.

[0074] In certain embodiments, methods comprising contacting a cell with a compound comprising a modified crRNA further comprise contacting the cell with a second compound to inhibit (or turn off) the CRISPR system after the target gene is edited.

[0075] In certain embodiments, gene editing methods comprising contacting a cell with a compound comprising a modified crRNA produce fewer and/or less deleterious off-target effects than gene editing methods that use of an unmodified crRNA in place of the modified crRNAs of the invention.

[0076] The disclosure includes the following numbered embodiments:

### Embodiment 1

[0077] A compound comprising a modified crRNA consisting of 35-45 linked nucleosides.

### Embodiment 2

[0078] A compound comprising a modified crRNA, wherein the CRISPR recognition portion of the modified crRNA consists of 17-20 linked nucleosides.

### Embodiment 3

[0079] A compound comprising a modified crRNA, wherein the target recognition portion of the modified crRNA consists of 18-23 linked nucleosides.

### Embodiment 4

[0080] A compound comprising a modified crRNA, wherein the modified crRNA comprises at least one linker nucleoside.

### Embodiment 5

[0081] A compound comprising a 5′-stabilized modified crRNA.

### Embodiment 6

[0082] The compound of any of embodiments 1-5, wherein the compound comprises a stabilizing conjugate group.

### Embodiment 7

[0083] The compound of any of embodiments 1-5, wherein the crRNA comprises at least one linker nucleoside comprising a stabilizing modification.

### Embodiment 8

[0084] The compound of any of embodiments 1-4, wherein the modified crRNA is 5′-stabilized.

### Embodiment 9

[0085] The compound of any of embodiments 1-8, wherein the modified crRNA is 3′-stabilized.

### Embodiment 10

[0086] The compound of any of embodiments 1-9, wherein the CRISPR recognition portion of the modified crRNA binds to a Cpf1 nuclease.

### Embodiment 11

[0087] The compound of any of embodiments 1-10, wherein the target recognition portion of the modified crRNA comprises at least one modification that increases affinity of the crRNA for a target DNA or RNA.

### Embodiment 12

[0088] The compound of any of embodiments 10-11, wherein the CRISPR recognition portion of the modified crRNA comprises at least one modification that increases affinity of the crRNA for a Cpf1 nuclease.

### Embodiment 13

[0089] The compound of any of embodiments 1-12, wherein at least one nucleobase of the modified crRNA is thymine.

### Embodiment 14

[0090] The compound of any of embodiments 1-13, wherein at least one nucleobase of the modified crRNA is a modified nucleobase.

### Embodiment 15

[0091] The compound of embodiment 14, wherein the modified nucleobase is 5-methyl cytosine.

### Embodiment 16

[0092] The compound of any of embodiments 1-15, wherein modified crRNA consists of 35-42 linked nucleosides.

### Embodiment 17

[0093] The compound of any of claim 1-15, wherein the modified crRNA consists of 36-40 linked nucleosides.

### Embodiment 18

[0094] The compound of any of embodiments 1-17, wherein the modified crRNA comprises at least two linker nucleosides.

### Embodiment 19

[0095] The compound of embodiment 18, wherein at least two linker nucleosides are linked to the CRISPR recognition portion of the modified crRNA.

### Embodiment 20

[0096] The compound of embodiment 19, wherein at least two linker nucleosides are linked to the 5′-end of the CRISPR recognition portion of the modified crRNA.

### Embodiment 21

[0097] The compound of any of embodiments 1-20, wherein the CRISPR recognition portion of the modified crRNA consists of 18-20 linked nucleosides.

### Embodiment 22

[0098] The compound of embodiment 21, wherein the CRISPR recognition portion of the modified crRNA consists of 18 linked nucleosides.

### Embodiment 23

[0099] The compound of embodiment 21, wherein the CRISPR recognition portion of the modified crRNA consists of 19 linked nucleosides.

### Embodiment 24

[0100] The compound of embodiment 21, wherein the CRISPR recognition portion of the modified crRNA consists of 20 linked nucleosides.

### Embodiment 25

[0101] The compound of any of embodiments 1-24, wherein the target recognition protion of the modified crRNA consists of 18-22 linked nucleosides.

### Embodiment 26

[0102] The compound of any of embodiments 1-24, wherein the target recognition protion of the modified crRNA consists of 18-20 linked nucleosides.

### Embodiment 27

[0103] The compound of embodiment 26, wherein the target recognition protion of the modified crRNA consists of 18 linked nucleosides.

### Embodiment 28

[0104] The compound of embodiment 26, wherein the target recognition protion of the modified crRNA consists of 19 linked nucleosides.

### Embodiment 29

[0105] The compound of embodiment 26, wherein the target recognition protion of the modified crRNA consists of 20 linked nucleosides.

### Embodiment 30

[0106] The compound of any of embodiments 1-29, wherein at least one internucleoside linkage of the modified crRNA is a modified internucleoside linkage.

### Embodiment 31

[0107] The compound of embodiment 30, wherein at least one internucleoside linkage is a phosphorothioate internucleoside linkage.

### Embodiment 32

[0108] The compound of embodiment 30 or 31, wherein each internucleoside linkage of the modified crRNA is a modified internucleoside linkage.

### Embodiment 33

[0109] The compound of any of embodiments 30-32, wherein at least one internucleoside linkage is a neutral internucleoside linkage.

### Embodiment 34

[0110] The compound of embodiment 33, wherein at least one modified internucleoside linkage comprises a methoxypropyl group.

### Embodiment 35

[0111] The compound of embodiment 33, wherein at least one modified internucleoside linkage comprises a phosphonoacetate.

### Embodiment 36

[0112] The compound of embodiment 33, wherein at least one modified internucleoside linkage comprises a methylphosphonate.

### Embodiment 37

[0113] The compound of any of embodiments 1-31, wherein each internucleoside linkage of the modified crRNA is a phosphodiester internucleoside linkage or a phosphorothioate internucleoside linkage.

### Embodiment 38

[0114] The compound of any of embodiments 30, 31, or 33-37, wherein at least two internucleoside linkages of the modified crRNA are modified internucleoside linkages.

### Embodiment 39

[0115] The compound of embodiment 38, wherein at least two modified internucleoside linkages of the modified crRNA are the same as one another.

### Embodiment 40

[0116] The compound of any of embodiments 1-39, wherein the modified crRNA comprises one to five contiguous phosphorothioate internucleoside linkages at the 5′-end of the modified crRNA.

### Embodiment 41

[0117] The compound of embodiment 40, wherein the modified crRNA comprises one phosphorothioate internucleoside linkage at the 5′-end of the modified crRNA.

### Embodiment 42

[0118] The compound of embodiment 40, wherein the modified crRNA comprises two contiguous phosphorothioate internucleoside linkages at the 5′-end of the modified crRNA.

### Embodiment 43

[0119] The compound of any of embodiments 1-42, wherein the modified crRNA comprises at least one linker nucleoside that is linked to the CRISPR recognition portion of the modified crRNA by a modified internucleoside linkage.

### Embodiment 44

[0120] The compound of embodiment 43, wherein the modified internucleoside linkage that links the at least one linker nucleoside to the CRISPR recognition portion of the modified crRNA is a phosphorothiaote internucleoside linkage.

### Embodiment 45

[0121] The compound of embodiment 44, wherein the modified crRNA comprises two linker nucleosides.

### Embodiment 46

[0122] The compound of embodiment 45, wherein the linker nucleosides are linked to each other by a modified internucleoside linkage.

### Embodiment 47

[0123] The compound of embodiment 46, wherein the modified internucleoside that links the linker nucleosides to each other is a phosphorothioate internucleoside linkage.

### Embodiment 48

[0124] The compound of any embodiments 43-44, wherein the modified crRNA comprises more than two linker nucleosides.

### Embodiment 49

[0125] The compound of any of embodiments 1-48, wherein the modified crRNA comprises one to six modified internucleoside linkages within the target recognition portion of the modified crRNA.

### Embodiment 50

[0126] The compound of embodiment 49, wherein the one to six modified internucleoside linkages within the target recognition portion of the modified crRNA are contiguous.

### Embodiment 51

[0127] The compound of embodiment 49, wherein the one to six modified internucleoside linkages within the target recognition portion of the modified crRNA alternate with unmodified internucleoside linkages.

### Embodiment 52

[0128] The compound of any of embodiments 49-51, wherein the 3′-end of the target recognition portion of the modified crRNA contains the one to six modified internucleoside linkages.

### Embodiment 53

[0129] The compound of any of embodiments 50-52, wherein the target recognition portion of the modified crRNA comprises one modified internucleoside linkage.

### Embodiment 54

[0130] The compound of any of embodiments 50-52, wherein the target recognition portion of the modified crRNA comprises two modified internucleoside linkages.

### Embodiment 55

[0131] The compound of any of embodiments 50-52, wherein the target recognition portion of the modified crRNA comprises three modified internucleoside linkages.

### Embodiment 56

[0132] The compound of any of embodiments 50-52, wherein the target recognition portion of the modified crRNA comprises four modified internucleoside linkages.

### Embodiment 57

[0133] The compound of any of embodiments 50-52, wherein the target recognition portion of the modified crRNA comprises five modified internucleoside linkages.

### Embodiment 58

[0134] The compound of any of embodiments 50-52, wherein the target recognition portion of the modified crRNA comprises six modified internucleoside linkages.

### Embodiment 59

[0135] The compound of any of embodiments 49-58, wherein at least one internucleoside linkage within the target recognition portion of the modified crRNA is a phosphorothioate internucleoside linkage.

### Embodiment 60

[0136] The compound of any of embodiments 49-58, wherein all of the modified internucleoside linkages within the target recognition portion of the modified crRNA are phosphorothioate internucleoside linkages.

### Embodiment 61

[0137] The compound of any of embodiments 1-60, wherein the target recognition portion of the modified crRNA is directly or indirectly linked to the 3′ end of the CRISPR recognition portion of the modified crRNA.

### Embodiment 62

[0138] The compound of any of embodiments 1-61, wherein at least one nucleoside of the modified crRNA comprises a modified sugar moiety.

### Embodiment 63

[0139] The compound of embodiment 62, wherein the 5′-terminal nucleoside of the crRNA comprises a modified sugar moiety.

### Embodiment 64

[0140] The compound of embodiment 63, wherein the 5′-terminal nucleoside comprises a linearly modified sugar moiety.

### Embodiment 65

[0141] The compound of embodiment 64, wherein the 5′-terminal nucleoside comprises a 2′-modified sugar moiety.

### Embodiment 66

[0142] The compound of embodiment 63, wherein the 5′-terminal nucleoside comprises a bicyclic sugar moiety.

### Embodiment 67

[0143] The compound of embodiment 63, wherein the 5′-terminal nucleoside comprises a modified sugar moiety selected from among: 2′-O-methyl, 2′-MOE, 2′-F, cEt, and LNA.

### Embodiment 68

[0144] The compound of any of embodiments 1-67, wherein the 5′-terminal nucleoside is a linker nucleoside.

### Embodiment 69

[0145] The compound of any of embodiments 62-68, wherein the 5^{th} nucleoside from the 5′-end of the CRISPR recognition portion comprises a modified sugar moiety.

### Embodiment 70

[0146] The compound of any of embodiments 62-69, wherein the 6^{th} nucleoside from the 5′-end of the CRISPR recognition portion comprises a modified sugar moiety.

### Embodiment 71

[0147] The compound of any of embodiments 62-70, wherein the 7^{th} nucleoside from the 5′-end of the CRISPR recognition portion comprises a modified sugar moiety.

### Embodiment 72

[0148] The compound of any of embodiments 62-71, wherein the 10^{th} nucleoside from the 5′-end of the CRISPR recognition portion comprises a modified sugar moiety.

### Embodiment 73

[0149] The compound of any of embodiments 62-72, wherein the 14^{th} nucleoside from the 5′-end of the CRISPR recognition portion comprises a modified sugar moiety.

### Embodiment 74

[0150] The compound of any of embodiments 62-73, wherein the 1st nucleoside from the 3′-end of the CRISPR recognition portion comprises a modified sugar moiety.

### Embodiment 75

[0151] The compound of any of embodiments 69-74, wherein at least one modified sugar moiety selected from among: 2′-O-methyl, 2′-MOE, 2′-F, cEt, and LNA.

### Embodiment 76

[0152] The compound of any of embodiments 69-74, wherein each modified sugar moiety is independently selected from among: 2′-O-methyl, 2′-MOE, 2′-F, cEt, and LNA.

### Embodiment 77

[0153] The compound of embodiment 62, wherein the 3′-terminal nucleoside of the modified crRNA comprises a modified sugar moiety.

### Embodiment 78

[0154] The compound of embodiment 77, wherein the 3′-terminal nucleoside comprises a linearly modified sugar moiety.

### Embodiment 79

[0155] The compound of embodiment 78, wherein the 3′-terminal nucleoside comprises a 2′-modified sugar moiety.

### Embodiment 80

[0156] The compound of embodiment 77, wherein the 3′-terminal nucleoside comprises a bicyclic sugar moiety.

### Embodiment 81

[0157] The compound of embodiment 77, wherein the 3′-terminal nucleoside comprises a modified sugar moiety selected from among: 2′-O-methyl, 2′-MOE, 2′-F, cEt, and LNA.

### Embodiment 82

[0158] The compound of any of embodiments 62-81, wherein the 1st nucleoside from the 5′-end of the target recognition portion comprises a modified sugar moiety.

### Embodiment 83

[0159] The compound of any of embodiments 62-82, wherein the 8th nucleoside from the 5′-end of the target recognition portion comprises a modified sugar moiety.

### Embodiment 84

[0160] The compound of any of embodiments 62-83, wherein the 9th nucleoside from the 5′-end of the target recognition portion comprises a modified sugar moiety.

### Embodiment 85

[0161] The compound of any of embodiments 62-84, wherein one to five 3′-terminal nucleosides of the target recognition portion of the modified crRNA each comprise a modified sugar moiety.

### Embodiment 86

[0162] The compound of embodiment 85, wherein the one to five 3′-terminal nucleosides of the target recognition portion of the modified crRNA each comprise the same modified sugar moiety.

### Embodiment 87

[0163] The compound of embodiment 84 or 85, wherein the modified sugar moieties of the one to five 3′-terminal nucleosides of the target recognition portion are each independently selected from among 2′-O-methyl, 2′-MOE, 2′-F, cEt, and LNA.

### Embodiment 88

[0164] The compound of any of embodiments 1-87, wherein the target recognition portion of the modified crRNA comprises at least one unmodified sugar moiety.

### Embodiment 89

[0165] The compound of any of embodiments 1-88, wherein the CRISPR recognition portion of the modified crRNA comprises at least one unmodified sugar moiety.

### Embodiment 90

[0166] The compound of any of embodiments 1-89, wherein the modified crRNA comprises at least one linker nucleoside that comprises an unmodified sugar moiety.

### Embodiment 91

[0167] The compound of any of embodiments 1-90, wherein the compound consists of the modified crRNA.

### Embodiment 92

[0168] The compound of any of embodiments 1-91, wherein the nucleobase sequence of the target recognition portion of the modified crRNA is at least 90% complementary to a target DNA or RNA.

### Embodiment 93

[0169] The compound of embodiment 92, wherein the nucleobase sequence of the target recognition portion of the modified crRNA is 100% complementary to a target DNA or RNA.

### Embodiment 94

[0170] The compound of any of embodiments 1-93, wherein the modified crRNA comprises a self-complementary region.

### Embodiment 95

[0171] The compound of embodiment 94, wherein the self-complementary region is within the CRISPR recognition portion of the modified crRNA.

### Embodiment 96

[0172] The compound of embodiment 94 or 95, wherein the self-complementary region can form a hairpin.

### Embodiment 97

[0173] The compound of any of embodiments 94-96, wherein the self-complementary region comprises at least one modification that increases the stability of the self-complementary region.

### Embodiment 98

[0174] The compound of any of embodiments 94-97, wherein the self-complementary region comprises at least one modification that increases the hybridization affinity of the self-complementary region.

### Embodiment 99

[0175] The compound of any of embodiments 1-98, wherein the nucleobase sequence of the CRISPR recognition portion of the modified crRNA comprises at least 12 contiguous nucleobases of a sequence selected from Table A.

### Embodiment 100

[0176] The compound of any of embodiments 1-98, wherein the nucleobase sequence of the CRISPR recognition portion of the modified crRNA consists of a sequence or a portion of a sequence selected from Table A.

### Embodiment 101

[0177] The compound of any of embodiments 1-100, wherein the nucleobase sequence of the CRISPR recognition portion of the modified crRNA comprises the sequence XCXACX, wherein each X is, independently, a U nucleobase or a T nucleobase.

### Embodiment 102

[0178] The compound of any of embodiments 1-100, wherein the nucleobase sequence of the CRISPR recognition portion of the modified crRNA comprises the sequence GXAGAX, wherein each X is, independently, a U nucleobase or a T nucleobase.

### Embodiment 103

[0179] The compound of any of embodiments 1-100, wherein the nucleobase sequence of the CRISPR recognition portion of the modified crRNA comprises the sequence XCXACX and the sequence GXAGAX, wherein each X is, independently, a U nucleobase or a T nucleobase.

### Embodiment 104

[0180] The compound of any of embodiments 1-90 or 92-103, wherein the compound comprises a conjugate group.

### Embodiment 105

[0181] The compound of embodiment 104, wherein the conjugate group comprises GalNAc.

### Embodiment 106

[0182] The compound of embodiment 104, wherein the conjugate group is lipophilic.

### Embodiment 107

[0183] The compound of embodiment 106, wherein the conjugate group comprises a lipid.

### Embodiment 108

[0184] A pharmaceutical composition comprising the compound of any of embodiments 1-107.

### Embodiment 109

[0185] A method comprising contacting a cell with the compound or composition of any of embodiments 1-108.

### Embodiment 110

[0186] The method of embodiment 109, wherein the cell expresses a Cpf1 nuclease.

### Embodiment 111

[0187] A method comprising contacting a cell with the compound or composition of any of embodiments 1-108 and a plasmid that encodes a Cpf1 nuclease.

### Embodiment 112

[0188] A method comprising contacting a cell with the compound or composition of any of embodiments 1-108 and an mRNA that encodes a Cpf1 nuclease.

### Embodiment 113

[0189] The method of any of embodiments 109-112, wherein the modified crRNA is taken up by the cell in the absence of a transfection reagent.

### Embodiment 114

[0190] The method of any of embodiments 109-113, wherein the cell is in an animal.

### Embodiment 115

[0191] A method comprising administering to an animal the compound or composition of any of embodiments 1-108.

### Embodiment 116

[0192] The method of embodiment 115, wherein the administration is subcutaneous.

### Embodiment 117

[0193] The method of embodiment 115, wherein the administration is intrathecal.

### Embodiment 118

[0194] The method of any of embodiments 115-117 comprising administering a plasmid that encodes a Cpf1 nuclease.

### Embodiment 119

[0195] The method of any of embodiments 115-117 wherein the animal expresses a Cpf1 nuclease.

### Embodiment 120

[0196] The method of embodiment 111 or 118, wherein the plasmid is delivered to cells within the animal via an adeno-associated virus (AAV).

### Embodiment 121

[0197] The method of embodiment 111 or 118, wherein the plasmid is delivered to cells within the animal via a lentivirus.

### Embodiment 122

[0198] The method of any of embodiments 109-121, wherein a target gene is edited.

### Embodiment 123

[0199] The method of embodiment 122, wherein the modified crRNA is degraded in a cell after the target gene is edited in the cell.

### Embodiment 124

[0200] The method of any of embodiments 110-112 or 118-123, wherein the Cpf1 nuclease does not exhibit nuclease activity in the absence of the modified crRNA.

### Embodiment 125

[0201] The method of any of embodiments 109-124 comprising contacting the cell with a second compound that degrades or inhibits the activity or expression of the modified crRNA or a Cpf1 nuclease.

### Embodiment 126

[0202] The method of embodiment 125, wherein the cell is contacted with the second compound after a target gene has been edited.

### Embodiment 127

[0203] The method of embodiment 125 or 126, wherein the second compound comprises an oligonucleotide that is complementary to the modified crRNA.

### Embodiment 128

[0204] The method of embodiment 125 or 126, wherein the second compound comprises a crRNA that targets a Cpf1 nuclease gene.

### Embodiment 129

[0205] The method of embodiment 125 or 126, wherein the second compound comprises an oligonucleotide that is complementary to a Cpf1 transcript.

### Embodiment 130

[0206] The method of embodiment 128 or 129, wherein the expression of the Cpf1 nuclease is inhibited.

### Embodiment 131

[0207] The method of any of embodiments 114-130, wherein the animal is a human.

### Embodiment 132

[0208] The method of any of embodiments 109-131, wherein editing of at least one off-target gene is reduced relative to editing the at least one off-target gene when unmodified crRNA or a compound comprising more than 45 nucleosides is used in place of the modified crRNA.

### Embodiment 133

[0209] The method of any of embodiments 115 or 118-132, wherein the administration is intravitreal.

### Embodiment 134

[0210] The method of any of embodiments 109-113, wherein the cell is a plant cell.

### Embodiment 135

[0211] The method of any of embodiments 109-114, wherein the cell is a T-cell.

### Embodiment 136

[0212] A method of treating a disease in an individual comprising administering the compound of any of embodiments 1-107 or the composition of embodiment 108 to the individual, thereby treating the disease in the individual.

### Embodiment 137

[0213] Use of the compound of any of embodiments 1-107 or the composition of embodiment 108 for the treatment of a disease.

### Embodiment 138

[0214] Use of the compound of any of embodiments 1-107 or the composition of embodiment 108 for preparation of a medicament.

### Embodiment 139

[0215] A method of administering the compound of any of embodiments 1-107 or the composition of embodiment 108 to an animal, and harvesting an organ from the animal for transplantation into a human.

### Embodiment 140

[0216] The compound of any of embodiments 90-107, wherein the 5′-terminal nucleoside comprises a cEt modified sugar moiety.

### Embodiment 141

[0217] The compound of embodiment 140, wherein the 3′-end of the target recognition portion of the modified crRNA contains two contiguous phosphorothioate internucleoside linkages.

### Embodiment 142

[0218] The compound of any of embodiments 140-141, wherein each internucleoside linkage of the CRISPR recognition portion of the modified crRNA is phosphorothioate.

### Embodiment 143

[0219] The compound of any of embodiments 140-142, wherein the two 3′-terminal nucleosides of the target recognition portion of the modified crRNA each comprise a 2′-O-methyl modified sugar moiety.

### Embodiment 144

[0220] The compound of any of embodiments 140-143, wherein the 1″ nucleoside from the 5′-end of the CRISPR recognition portion comprises an unmodified sugar moiety.

### Embodiment 145

[0221] The compound of any of embodiments 140-144, wherein the modified crRNA comprises 30-38 unmodified sugar moieties.

### Embodiment 146

[0222] The compound of embodiment 145, wherein the modified crRNA comprises 36 unmodified sugar moieties.

### Embodiment 147

[0223] A pharmaceutical composition comprising the compound of any of embodiments 140-146.

### Embodiment 148

[0224] A method comprising contacting a cell with the compound or composition of any of embodiments 140-147.

### Embodiment 149

[0225] The method of embodiment 148, wherein the cell expresses a Cpf1 nuclease.

### Embodiment 150

[0226] A method comprising contacting a cell with the compound or composition of any of embodiments 140-147 and a plasmid that encodes a Cpf1 nuclease.

### Embodiment 151

[0227] A method comprising contacting a cell with the compound or composition of any of embodiments 140-147 and an mRNA that encodes a Cpf1 nuclease.

### Embodiment 152

[0228] The method of any of embodiments 148-151, wherein the modified crRNA is taken up by the cell in the absence of a transfection reagent.

### Embodiment 153

[0229] The method of any of embodiments 148-152, wherein the cell is in an animal.

### Embodiment 154

[0230] A method comprising administering to an animal the compound or composition of any of embodiments 140-147.

### Embodiment 155

[0231] The method of embodiment 154, wherein the administration is subcutaneous.

### Embodiment 156

[0232] The method of embodiment 154, wherein the administration is intrathecal.

### Embodiment 157

[0233] The method of any of embodiments 154-156 comprising administering a plasmid that encodes a Cpf1 nuclease.

### Embodiment 158

[0234] The method of any of embodiments 154-156 wherein the animal expresses a Cpf1 nuclease.

### Embodiment 159

[0235] The method of embodiment 150 or 157, wherein the plasmid is delivered to cells within the animal via an adeno-associated virus (AAV).

### Embodiment 160

[0236] The method of embodiment 150 or 157, wherein the plasmid is delivered to cells within the animal via a lentivirus.

### Embodiment 161

[0237] The method of any of embodiments 148-160, wherein a target gene is edited.

### Embodiment 162

[0238] The method of embodiment 161, wherein the modified crRNA is degraded in a cell after the target gene is edited in the cell.

### Embodiment 163

[0239] The method of any of embodiments 149-151 or 157-162, wherein the Cpf1 nuclease does not exhibit nuclease activity in the absence of the modified crRNA.

### Embodiment 164

[0240] The method of any of embodiments 148-163 comprising contacting the cell with a second compound that degrades or inhibits the activity or expression of the modified crRNA or a Cpf1 nuclease.

### Embodiment 165

[0241] The method of embodiment 164, wherein the cell is contacted with the second compound after a target gene has been edited.

### Embodiment 166

[0242] The method of embodiment 164 or 165, wherein the second compound comprises an oligonucleotide that is complementary to the modified crRNA.

### Embodiment 167

[0243] The method of embodiment 164 or 165, wherein the second compound comprises a crRNA that targets a Cpf1 nuclease gene.

### Embodiment 168

[0244] The method of embodiment 164 or 165, wherein the second compound comprises an oligonucleotide that is complementary to a Cpf1 transcript.

### Embodiment 169

[0245] The method of embodiment 167 or 168, wherein the expression of the Cpf1 nuclease is inhibited.

### Embodiment 170

[0246] The method of any of embodiments 153-169, wherein the animal is a human.

### Embodiment 171

[0247] The method of any of embodiments 148-170, wherein editing of at least one off-target gene is reduced relative to editing the at least one off-target gene when unmodified crRNA or a compound comprising more than 45 nucleosides is used in place of the modified crRNA.

### Embodiment 172

[0248] The method of any of embodiments 154 or 157-171, wherein the administration is intravitreal.

### Embodiment 173

[0249] The method of any of embodiments 148-152, wherein the cell is a plant cell.

### Embodiment 174

[0250] The method of any of embodiments 148-153, wherein the cell is a T-cell.

### Embodiment 175

[0251] A method of treating a disease in an individual comprising administering the compound of any of embodiments 140-146 or the composition of embodiment 147 to the individual.

### Embodiment 176

[0252] A method of treating a disease in an individual comprising administering the compound of any of embodiments 140-146 or the composition of embodiment 147 to the individual, thereby treating the disease in the individual.

### Embodiment 177

[0253] Use of the compound of any of embodiments 140-146 or the composition of embodiment 147 for the treatment of a disease.

### Embodiment 178

[0254] Use of the compound of any of embodiments 140-146 or the composition of embodiment 147 for preparation of a medicament.

### Embodiment 179

[0255] A method of administering the compound of any of embodiments 140-146 or the composition of embodiment 147 to an animal, and harvesting an organ from the animal for transplantation into a human.

### Embodiment 180

[0256] The compound of any of embodiments 91-107 or 140-146, wherein at least one modified nucleoside of the modified crRNA is a 2′-deoxynucleoside.

### Embodiment 181

[0257] The compound of any of embodiments 91-107 or 140-146, wherein at least one modified nucleoside of the modified crRNA comprises a linearly modified sugar moiety having a 2′-H substitution.

### Embodiment 182

[0258] The compound of any of embodiments 91-107 or 140-146, wherein at least one modified nucleoside of the modified crRNA comprises a modified 2′-H(H) sugar moiety as found in naturally occurring DNA.

### Embodiment 183

[0259] The compound of any of embodiments 91-107, 140-146, or 180-182, wherein the modified crRNA consists of 40 linked nucleosides.

### Embodiment 184

[0260] The compound of any of embodiments 91-107, 140-146, or 180-182, wherein the modified crRNA consists of 43 linked nucleosides.

### Embodiment 185

[0261] The compound of any of embodiments 91-107, 140-146, or 180-182, wherein the modified crRNA consists of 45 linked nucleosides.

### Embodiment 186

[0262] The compound of any of embodiments 91-107, 140-146, or 180-185, wherein the target recognition portion of the modified crRNA is at least 90% complementary to a DNMT1 nucleic acid.

### Embodiment 187

[0263] The compound of embodiment 186, wherein the target recognition portion is 100% complementary to a DNMT1 nucleic acid.

### Embodiment 188

[0264] The compound of embodiment 186 or 187, wherein the DNMT1 nucleic acid is a deoxyribonucleic acid.

### Embodiment 189

[0265] The compound of embodiment 188, wherein the DNMT1 nucleic acid is a human deoxyribonucleic acid.

### Embodiment 190

[0266] The compound of any of embodiments 91-107, 140-146, or 180-185, wherein the target recognition portion of the modified crRNA is at least 90% complementary to a LDLR nucleic acid.

### Embodiment 191

[0267] The compound of embodiment 190, wherein the target recognition portion is 100% complementary to a LDLR nucleic acid. The compound of embodiment 190 or 191, wherein the LDLR nucleic acid is a deoxyribonucleic acid.

### Embodiment 192

[0268] The compound of embodiment 191, wherein the LDLR nucleic acid is a human deoxyribonucleic acid.

### Embodiment 193

[0269] The compound of any of embodiments 91-107, 140-146, or 180-192, wherein the two 3′-terminal nucleosides of the modified crRNA comprise independently selected modified sugar moieities.

### Embodiment 194

[0270] The compound of any of embodiments 91-107, 140-146, or 180-192, wherein the three 3′-terminal nucleosides of the modified crRNA comprise independently selected modified sugar moieities.

### Embodiment 195

[0271] The compound of any of embodiments 91-107, 140-146, or 180-192, wherein the four 3′-terminal nucleosides of the modified crRNA comprise independently selected modified sugar moieities.

### Embodiment 196

[0272] The compound of any of embodiments 91-107, 140-146, or 180-192, wherein the five 3′-terminal nucleosides of the modified crRNA comprise independently selected modified sugar moieities.

### Embodiment 197

[0273] The compound of any of embodiments 77 or 193-196, wherein the modified sugar moieties of the 3′-terminal modified nucleosides are selected from among 2′-H(H), 2′-O-methyl, 2′-F, cEt, and LNA modified sugar moieties.

### Embodiment 198

[0274] The compound of embodiment 197, wherein the modified sugar moieties of the 3′-terminal modified nucleosides are selected from among 2′-H(H), 2′-O-methyl, and cEt modified sugar moieties.

### Embodiment 199

[0275] The compound of embodiment 197, wherein the modified sugar moieties of the 3′-terminal modified nucleosides are selected from among 2′-H(H) and 2′-O-methyl modified sugar moieties.

### Embodiment 200

[0276] The compound of embodiment 197, wherein the modified sugar moieties of the 3′-terminal modified nucleosides are selected from among cEt and LNA modified sugar moieties.

### Embodiment 201

[0277] The compound of any of embodiments 82-107, 140-146, or 180-200, wherein the 1st nucleoside from the 5′-end of the target recognition portion comprises a 2′-H(H) or 2′-F modified sugar moiety.

### Embodiment 202

[0278] The compound of any of embodiments 82-107, 140-146, or 180-201, wherein the 8th nucleoside from the 5′-end of the target recognition portion comprises a 2′-H(H) or 2′-F modified sugar moiety.

### Embodiment 203

[0279] The compound of any of embodiments 82-107, 140-146, or 180-202, wherein the 9th nucleoside from the 5′-end of the target recognition portion comprises a 2′-H(H) or 2′-F modified sugar moiety.

### Embodiment 204

[0280] The compound of any of embodiments 91-107, 140-146, or 180-203, wherein the modified crRNA comprises at least three of the following features:
[0281] a. two linker nucleosides linked to the 5′-end of the CRISPR recognition portion of the modified crRNA;
[0282] b. 1^{st}, 8^{th}, and/or 9^{th} nucleoside from the 5′-end of the target recognition portion of the modified crRNA independently comprising 2′-F or 2′-H(H) modified sugar moiety;
[0283] c. at least one terminal phosphorothioate internucleoside linkage at each of the 3′ and 5′ termini of the modified crRNA
[0284] d. each nucleoside of the CRISPR recognition portion comprising an unmodified sugar moiety
[0285] e. one to five 3′-terminal nucleosides of the modified crRNA comprising independently selected modified sugar moieities

### Embodiment 205

[0286] The compound of any of embodiments 1-107, 140-146, or 180-204, wherein the modified crRNA is a salt.

### Embodiment 206

[0287] A pharmaceutical composition comprising the compound of any of embodiments 180-205.

### Embodiment 207

[0288] The pharmaceutical composition of any of embodiments 108, 147, or 206, wherein the pharmaceutical composition comprises a ribonucleoprotein complex.

### Embodiment 208

[0289] The pharmaceutical composition of embodiment 207, wherein the ribonucleoprotein complex comprises a Cpf1 nuclease and the compound comprising the modified crRNA.

### Embodiment 209

[0290] A method comprising contacting a cell with the compound or composition of any of embodiments 180-208.

### Embodiment 210

[0291] A method comprising contacting a cell with the compound or composition of any of embodiments 180-207, wherein the cell expresses a Cpf1 nuclease.

### Embodiment 211

[0292] A method comprising contacting a cell with the compound or composition of any of embodiments 180-207 and a plasmid that encodes a Cpf1 nuclease.

### Embodiment 212

[0293] A method comprising contacting a cell with the compound or composition of any of embodiments 180-207 and an mRNA that encodes a Cpf1 nuclease.

### Embodiment 213

[0294] The method of any of embodiments 209-212, wherein the modified crRNA is taken up by the cell in the absence of a transfection reagent.

### Embodiment 214

[0295] The method of any of embodiments 209-213, wherein the cell is in an animal.

### Embodiment 215

[0296] A method comprising administering to an animal the compound or composition of any of embodiments 180-208.

### Embodiment 216

[0297] The method of embodiment 215, wherein the administration is subcutaneous.

### Embodiment 217

[0298] The method of embodiment 215, wherein the administration is intrathecal.

### Embodiment 218

[0299] The method of any of embodiments 215-217 comprising administering a plasmid that encodes a Cpf1 nuclease.

### Embodiment 219

[0300] The method of any of embodiments 215-217 wherein the animal expresses a Cpf1 nuclease.

### Embodiment 220

[0301] The method of embodiment 211 or 218, wherein the plasmid is delivered to cells within the animal via an adeno-associated virus (AAV).

### Embodiment 221

[0302] The method of embodiment 211 or 218, wherein the plasmid is delivered to cells within the animal via a lentivirus.

### Embodiment 222

[0303] The method of any of embodiments 209-221, wherein a target gene is edited.

### Embodiment 223

[0304] The method of embodiment 222, wherein the modified crRNA is degraded in a cell after the target gene is edited in the cell.

### Embodiment 224

[0305] The method of any of embodiments 210-212 or 215-223, wherein the Cpf1 nuclease does not exhibit nuclease activity in the absence of the modified crRNA.

### Embodiment 225

[0306] The method of any of embodiments 209-224 comprising contacting the cell with a second compound that degrades or inhibits the activity or expression of the modified crRNA or a Cpf1 nuclease.

### Embodiment 226

[0307] The method of embodiment 225, wherein the cell is contacted with the second compound after a target gene has been edited.

### Embodiment 227

[0308] The method of embodiment 225 or 226, wherein the second compound comprises an oligonucleotide that is complementary to the modified crRNA.

### Embodiment 228

[0309] The method of embodiment 225 or 226, wherein the second compound comprises a crRNA that targets a Cpf1 nuclease gene.

### Embodiment 229

[0310] The method of embodiment 225 or 226, wherein the second compound comprises an oligonucleotide that is complementary to a Cpf1 transcript.

### Embodiment 230

[0311] The method of embodiment 228 or 229, wherein the expression of the Cpf1 nuclease is inhibited.

### Embodiment 231

[0312] The method of any of embodiments 214-230, wherein the animal is a human.

### Embodiment 232

[0313] The method of any of embodiments 209-231, wherein editing of at least one off-target gene is reduced relative to editing the at least one off-target gene when unmodified crRNA or a compound comprising more than 45 nucleosides is used in place of the modified crRNA.

### Embodiment 233

[0314] The method of any of embodiments 215 or 218-232, wherein the administration is intravitreal.

### Embodiment 234

[0315] The method of any of embodiments 209-213, wherein the cell is a plant cell.

### Embodiment 235

[0316] The method of any of embodiments 209-214, wherein the cell is a T-cell.

### Embodiment 236

[0317] A method of treating a disease in an individual comprising administering the compound of any of embodiments 180-205 or the composition of any of embodiments 206-208 to the individual.

### Embodiment 237

[0318] A method of treating a disease in an individual comprising administering the compound of any of embodiments 180-205 or the composition any of embodiments 206-208 to the individual, thereby treating the disease in the individual.

### Embodiment 238

[0319] Use of the compound of any of embodiments 180-205 or the composition of any of embodiments 206-208 for the treatment of a disease.

### Embodiment 239

[0320] Use of the compound of any of embodiments 180-205 or the composition of any of embodiments 206-208 for preparation of a medicament.

### Embodiment 240

[0321] A method of administering the compound of any of embodiments 180-205 or the composition of any of embodiments 206-208 to an animal, and harvesting an organ from the animal for transplantation into a human.

### Embodiment 241

[0322] The compound of any of embodiments 1-107, 140-146, or 180-205, wherein the CRISPR recognition portion of the modified crRNA comprises at least one modified sugar moiety.

### Embodiment 242

[0323] The compound of embodiment 241, wherein the at least one modified sugar moiety of the CRISPR recognition portion is a linearly modified sugar moiety.

### Embodiment 243

[0324] The compound of embodiment 241, wherein the at least one modified sugar moiety of the CRISPR recognition portion is a bicyclic sugar moiety.

### Embodiment 244

[0325] The compound of embodiment 243, wherein the bicyclic sugar moiety is cEt or LNA.

### Embodiment 245

[0326] The compound of embodiment 243, wherein the bicyclic sugar moiety is cEt.

### Embodiment 246

[0327] The compound of any of claims 241-245, wherein the 2nd nucleoside from the 3′-end of the CRISPR recognition portion comprises the at least one modified sugar moiety.

### Embodiment 247

[0328] The compound of any of claims 241-245, wherein the 3rd nucleoside from the 3′-end of the CRISPR recognition portion comprises the at least one modified sugar moiety.

### Embodiment 248

[0329] The compound of any of claims 241-245, wherein the 4th nucleoside from the 3′-end of the CRISPR recognition portion comprises the at least one modified sugar moiety.

### Embodiment 249

[0330] The compound of any of claims 241-245, wherein the 5th nucleoside from the 3′-end of the CRISPR recognition portion comprises the at least one modified sugar moiety.

### Embodiment 250

[0331] The compound of any of claims 241-245, wherein the 6th nucleoside from the 3′-end of the CRISPR recognition portion comprises the at least one modified sugar moiety.

### Embodiment 251

[0332] The compound of any of claims 241-245, wherein the 7th nucleoside from the 3′-end of the CRISPR recognition portion comprises the at least one modified sugar moiety.

### Embodiment 252

[0333] The compound of any of claims 241-245, wherein the 8th nucleoside from the 3′-end of the CRISPR recognition portion comprises the at least one modified sugar moiety.

### Embodiment 253

[0334] The compound of any of claims 241-245, wherein the 9th nucleoside from the 3′-end of the CRISPR recognition portion comprises the at least one modified sugar moiety.

### Embodiment 254

[0335] The compound of any of claims 241-245, wherein the 11th nucleoside from the 3′-end of the CRISPR recognition portion comprises the at least one modified sugar moiety.

### Embodiment 255

[0336] The compound of any of claims 241-245, wherein the 12th nucleoside from the 3′-end of the CRISPR recognition portion comprises the at least one modified sugar moiety.

### Embodiment 256

[0337] The compound of any of claims 241-245, wherein the 13th nucleoside from the 3′-end of the CRISPR recognition portion comprises the at least one modified sugar moiety.

### Embodiment 257

[0338] The compound of any of claims 241-245, wherein the 18^{th} nucleoside from the 3′-end of the CRISPR recognition portion comprises the at least one modified sugar moiety.

### Embodiment 258

[0339] The compound of any of claims 241-245, wherein the 11^{th} and 12^{th} nucleosides from the 3′-end of the CRISPR recognition portion each comprise a modified sugar moiety.

### Embodiment 259

[0340] The compound of any of claims 241-258, wherein the 1″ nucleoside from the 3′-end of the CRISPR recognition portion comprises an unmodified sugar moiety.

### Embodiment 260

[0341] The compound of any of claims 241-259, wherein the 10^{th} nucleoside from the 3′-end of the CRISPR recognition portion comprises an unmodified sugar moiety.

### Embodiment 261

[0342] The compound of any of claims 241-260, wherein the 14^{th} nucleoside from the 3′-end of the CRISPR recognition portion comprises an unmodified sugar moiety.

### Embodiment 262

[0343] The compound of any of claims 241-261, wherein the 15^{th} nucleoside from the 3′-end of the CRISPR recognition portion comprises an unmodified sugar moiety.

### Embodiment 263

[0344] The compound of any of claims 241-262, wherein the 16^{th} nucleoside from the 3′-end of the CRISPR recognition portion comprises an unmodified sugar moiety.

### Embodiment 264

[0345] The compound of any of claims 241-263, wherein the 17^{th} nucleoside from the 3′-end of the CRISPR recognition portion comprises an unmodified sugar moiety.

### Embodiment 265

[0346] The compound of any of claims 241-264, wherein the 1st nucleoside from the 5′-end of the CRISPR recognition portion comprises an unmodified sugar moiety.

### Embodiment 266

[0347] The compound of any of claims 241-265, wherein the 2nd nucleoside from the 5′-end of the CRISPR recognition portion comprises an unmodified sugar moiety.

### Embodiment 267

[0348] The compound of any of claims 241-266, wherein the 3rd nucleoside from the 5′-end of the CRISPR recognition portion comprises an unmodified sugar moiety.

### Embodiment 268

[0349] The compound of any of claim 1-107, 140-146, 180-205, or 241-267, wherein the 14^{th} nucleoside from the 5′-end of the target recognition portion comprises a modified sugar moiety.

### Embodiment 269

[0350] The compound of any of claim 1-107, 140-146, 180-205, or 241-268, wherein the 15^{th} nucleoside from the 5′-end of the target recognition portion comprises a modified sugar moiety.

### Embodiment 270

[0351] The compound of any of claim 1-107, 140-146, 180-205, or 241-269, wherein the 16^{th} nucleoside from the 5′-end of the target recognition portion comprises a modified sugar moiety.

### Embodiment 271

[0352] The compound of any of claims 268-270, wherein each modified sugar moiety at position 14, 15, and/or 16 from the 5′-end of the target recognition portion is a linearly modified sugar moiety.

### Embodiment 272

[0353] The compound of claim 271, wherein each modified sugar moiety at position 14, 15, and/or 16 from the 5′-end of the target recognition portion is independently selected from 2′-H(H) and 2′-F modified sugar moieties.

### Embodiment 273

[0354] The compound of claim 272, wherein each modified sugar moiety at position 14, 15, and/or 16 from the 5′-end of the target recognition portion is a 2′-H(H) modified sugar moiety.

### Embodiment 274

[0355] The compound of any of claim 1-107, 140-146, 180-205, or 241-273, wherein the modified crRNA comprises at least three of the following features:
[0356] (a) two linker nucleosides linked to the 5′-end of the CRISPR recognition portion of the modified crRNA;
[0357] (b) 1^{st}, 8^{th}, and/or 9^{th} nucleoside from the 5′-end of the target recognition portion of the modified crRNA independently comprising 2′-F or 2′-H(H) modified sugar moiety;
[0358] (c) at least one terminal phosphorothioate internucleoside linkage at each of the 3′ and 5′ termini of the modified crRNA
[0359] (d) at least one nucleoside at position 5, 6, 7, 8, 11, or 12 from the 3′-end of the CRISPR recognition portion comprises a modified sugar moiety
[0360] (e) one to five 3′-terminal nucleosides of the modified crRNA comprising independently selected modified sugar moieities

### Embodiment 275

[0361] The compound of claim 274, wherein the modified crRNA comprises features (a),
[0362] (c), and (e).

### Embodiment 276

[0363] The compound of claim 274, wherein the modified crRNA comprises features (a),
[0364] (c), and (d).

### Embodiment 277

[0365] The compound of claim 274, wherein the modified crRNA comprises features (a),
[0366] (b), and (c).

### Embodiment 278

[0367] The compound of claim 274, wherein the modified crRNA comprises features (a),
[0368] (b), (c), and (e).

### Embodiment 279

[0369] The compound of claim 274, wherein the modified crRNA comprises features (a),
[0370] (c), (d), and (e).

### Embodiment 280

[0371] The compound of claim 274, wherein the modified crRNA comprises features (a),
[0372] (b), (c), (d), and (e).

### Embodiment 281

[0373] A pharmaceutical composition comprising the compound of any of claims 241-280.

### Embodiment 282

[0374] The pharmaceutical composition of claim 281, wherein the pharmaceutical composition comprises a ribonucleoprotein complex.

### Embodiment 283

[0375] The pharmaceutical composition of claim 282, wherein the ribonucleoprotein complex comprises a Cpf1 nuclease and the compound comprising the modified crRNA.

### Embodiment 284

[0376] A method comprising contacting a cell with the compound or composition of any of claims 241-283.

### Embodiment 285

[0377] A method comprising contacting a cell with the compound or composition of any of claims 241-283, wherein the cell expresses a Cpf1 nuclease.

### Embodiment 286

[0378] A method comprising contacting a cell with the compound or composition of any of claims 241-283 and a plasmid that encodes a Cpf1 nuclease.

### Embodiment 287

[0379] A method comprising contacting a cell with the compound or composition of any of claims 241-283 and an mRNA that encodes a Cpf1 nuclease.

### Embodiment 288

[0380] The method of any of claims 284-287, wherein the modified crRNA is taken up by the cell in the absence of a transfection reagent.

### Embodiment 289

[0381] The method of any of claims 284-288, wherein the cell is in an animal.

### Embodiment 290

[0382] A method comprising administering to an animal the compound or composition of any of claims 241-283.

### Embodiment 291

[0383] The method of claim 290, wherein the administration is subcutaneous.

### Embodiment 292

[0384] The method of claim 290, wherein the administration is intrathecal.

### Embodiment 293

[0385] The method of any of claims 290-292 comprising administering a plasmid that encodes a Cpf1 nuclease.

### Embodiment 294

[0386] The method of any of claims 290-292 wherein the animal expresses a Cpf1 nuclease.

### Embodiment 295

[0387] The method of claim 286 or 293, wherein the plasmid is delivered to cells within the animal via an adeno-associated virus (AAV).

### Embodiment 296

[0388] The method of claim 286 or 293, wherein the plasmid is delivered to cells within the animal via a lentivirus.

### Embodiment 297

[0389] The method of any of claims 284-296, wherein a target gene is edited.

### Embodiment 298

[0390] The method of claim 297, wherein the modified crRNA is degraded in a cell after the target gene is edited in the cell.

### Embodiment 299

[0391] The method of any of claim 285-287 or 293-298, wherein the Cpf1 nuclease does not exhibit nuclease activity in the absence of the modified crRNA.

### Embodiment 300

[0392] The method of any of claims 284-299 comprising contacting the cell with a second compound that degrades or inhibits the activity or expression of the modified crRNA or a Cpf1 nuclease.

### Embodiment 301

[0393] The method of claim 300, wherein the cell is contacted with the second compound after a target gene has been edited.

### Embodiment 302

[0394] The method of claim 300 or 301, wherein the second compound comprises an oligonucleotide that is complementary to the modified crRNA.

### Embodiment 303

[0395] The method of claim 300 or 301, wherein the second compound comprises a crRNA that targets a Cpf1 nuclease gene.

### Embodiment 304

[0396] The method of claim 300 or 301, wherein the second compound comprises an oligonucleotide that is complementary to a Cpf1 transcript.

### Embodiment 305

[0397] The method of claim 303 or 304, wherein the expression of the Cpf1 nuclease is inhibited.

### Embodiment 306

[0398] The method of any of claims 289-305, wherein the animal is a human.

### Embodiment 307

[0399] The method of any of claims 284-306, wherein editing of at least one off-target gene is reduced relative to editing the at least one off-target gene when unmodified crRNA or a compound comprising more than 45 nucleosides is used in place of the modified crRNA.

### Embodiment 308

[0400] The method of any of claim 290 or 293-297, wherein the administration is intravitreal.

### Embodiment 309

[0401] The method of any of claims 284-288, wherein the cell is a plant cell.

### Embodiment 310

[0402] The method of any of claims 284-289, wherein the cell is a T-cell.

### Embodiment 311

[0403] A method of treating a disease in an individual comprising administering the compound of any of claims 241-280 or the composition of any of claims 281-283 to the individual.

### Embodiment 312

[0404] A method of treating a disease in an individual comprising administering the compound of any of claims 241-280 or the composition any of claims 281-283 to the individual, thereby treating the disease in the individual.

### Embodiment 313

[0405] Use of the compound of any of claims 241-280 or the composition of any of claims 281-283 for the treatment of a disease.

### Embodiment 314

[0406] Use of the compound of any of claims 241-280 or the composition of any of claims 281-283 for preparation of a medicament.

### Embodiment 315

[0407] A method of administering the compound of any of claims 241-280 or the composition of any of claims 281-283 to an animal, and harvesting an organ from the animal for transplantation into a human.

### Embodiment 316

[0408] The pharmaceutical composition of any of embodiments 108, 147, 206, or 281 comprising a liposome or lipid nanoparticle.

### Embodiment 317

[0409] The pharmaceutical composition of any of embodiments 108, 147, 206, 281, or 316 comprising mRNA that encodes a Cpf1 nuclease.

### Embodiment 318

[0410] The pharmaceutical composition of embodiment 317, wherein the compound comprising the modified crRNA and the mRNA encoding a Cpf1 nuclease are contained with a liposome or lipid nanoparticle.

### Embodiment 319

[0411] The method of any of embodiments 212-214, 151-153, 212-214, or 287-289, wherein the mRNA encoding the Cpf1 nuclease and the compound comprising the modified crRNA are contained within a liposome or lipid nanoparticle.

### Embodiment 320

[0412] A method of treating a disease in an individual comprising administering the pharmaceutical composition of any of embodiments 316-318 to the individual.

### Embodiment 321

[0413] A method of treating a disease in an individual comprising administering the pharmaceutical composition of any of embodiments 316-318 to the individual, thereby treating the disease in the individual.

[0414] A. Certain Modified Nucleosides

[0415] Certain compounds of the present invention incorporate modified nucleosides. Unless otherwise provided, the following modified nucleosides, without limitation, are suitable for such incorporation into modified oligonucleotides for use as crRNA. In certain embodiments, modified oligonucleotides comprise at least one modified nucleoside. Such modified nucleosides comprise a modified sugar moiety or a modified nucleobase or both a modified sugar moiety and a modified nucleobase.

[0416] 1. Certain Sugar Moieties

[0417] In certain embodiments, modified oligonucleotides, such as modified crRNAs, comprise one or more modified nucleosides comprising a modified sugar moiety. Such modified oligonucleotides comprising one or more sugar-modified nucleosides may have desirable properties, such as enhanced nuclease stability or increased binding affinity with a target nucleic acid relative to oligonucleotides lacking such sugar-modified nucleosides. In certain embodiments, modified sugar moieties are linearly modified sugar moieties. In certain embodiments, modified sugar moieties are bicyclic or tricyclic sugar moieties. In certain embodiments, modified sugar moieties are sugar surrogates. Such sugar surrogates may comprise one or more substitutions corresponding to those of substituted sugar moieties.

[0418] In certain embodiments, modified sugar moieties are linearly modified sugar moieties comprising a furanosyl ring with one or more acyclic substituent, including but not limited to substituents at the 2′ and/or 5′ positions. Examples of 2′-substituent groups suitable for linearly modified sugar moieties for use in modified crRNA include but are not limited to: 2′-H, 2′-F, 2′-OCH₃ (“OMe” or “O-methyl”), and 2′-O(CH₂)₂OCH₃ (“MOE”). The 2′-substituent groups of such linearly modified sugar moieties replace the 2′-OH group that is present in unmodified sugar moities. In certain embodiments, 2′-substituent groups are selected from among: halo, allyl, amino, azido, SH, CN, OCN, CF₃, OCF₃, O—C₁-C₁₀ alkoxy, O—C₁-C₁₀ substituted alkoxy, O—C₁-C₁₀ alkyl, O—C₁-C₁₀ substituted alkyl, S-alkyl, N(Rₘ)-alkyl, O-alkenyl, S-alkenyl, N(Rₘ)-alkenyl, O-alkynyl, S-alkynyl, N(Rₘ)-alkynyl, O-alkylenyl-O-alkyl, alkynyl, alkaryl, aralkyl, O-alkaryl, O-aralkyl, O(CH₂)₂SCH₃, O(CH₂)₂ON(Rₘ)(Rₙ) or OCH₂C(═O)—N(Rₘ)(Rₙ), where each Rₘ and Rₙ is, independently, H, an amino protecting group, or substituted or unsubstituted C₁-C₁₀ alkyl. Certain embodiments of these 2′-substituent groups can be further substituted with one or more substituent groups independently selected from among: hydroxyl, amino, alkoxy, carboxy, benzyl, phenyl, nitro (NO₂), thiol, thioalkoxy, thioalkyl, halogen, alkyl, aryl, alkenyl and alkynyl. Examples of 5′-substituent groups suitable for linearly modified sugar moieties include but are not limited to: 5′-methyl (R or S), 5′-vinyl, and 5′-methoxy. In certain embodiments, linearly modified sugars comprise more than one non-bridging sugar substituent, for example, 2′-F-5′-methyl sugar moieties (see, e.g., PCT International Application WO 2008/101157, for additional 2′, 5′-bis substituted sugar moieties and nucleosides).

[0419] In certain embodiments, a 2′-substituted nucleoside or 2′-linearly modified nucleoside comprises a sugar moiety comprising a linear 2′-substituent group selected from: H, F, NH₂, N₃, OCF₃, OCH₃, O(CH₂)₃NH₂, CH₂CH═CH₂, OCH₂CH═CH₂, OCH₂CH₂OCH₃, O(CH₂)₂SCH₃, O(CH₂)₂ON(Rₘ)(Rₙ), O(CH₂)₂O(CH₂)₂N(CH₃)₂, and N-substituted acetamide (OCH₂C(═O)—N(Rₘ)(Rₙ)), where each Rₘ and Rₙ is, independently, H, an amino protecting group, or substituted or unsubstituted C₁-C₁₀ alkyl.

[0420] In certain embodiments, a 2′-substituted nucleoside or 2′-linearly modified nucleoside comprises a sugar moiety comprising a linear 2′-substituent group selected from: H, F, OCF₃, OCH₃, OCH₂CH₂OCH₃, O(CH₂)₂SCH₃, O(CH₂)₂ON(CH₃)₂, O(CH₂)₂O(CH₂)₂N(CH₃)₂, and OCH₂C(═O)—N(H)CH₃ (“NMA”).

[0421] In certain embodiments, a 2′-substituted nucleoside or 2′-linearly modified nucleoside comprises a sugar moiety comprising a linear 2′-substituent group selected from: H, F, OCH₃, and OCH₂CH₂OCH₃.

[0422] Nucleosides comprising modified sugar moieties, such as linearly modified sugar moieties, are referred to by the position(s) of the substitution(s) on the sugar moiety of the nucleoside. For example, nucleosides comprising 2′-substituted or 2-modified sugar moieties are referred to as 2′-substituted nucleosides or 2-modified nucleosides.

[0423] Certain modifed sugar moieties comprise a bridging sugar substituent that forms a second ring resulting in a bicyclic sugar moiety. In certain such embodiments, the bicyclic sugar moiety comprises a bridge between the 4′ and the 2′ furanose ring atoms. Examples of such 4′ to 2′ bridging sugar substituents include but are not limited to: 4′-CH₂-2′, 4′-(CH₂)₂-2′, 4′-(CH₂)₃-2′, (“LNA”), 4′-CH₂—S-2′, 4′-(CH₂)₂—O-2′ (“ENA”), 4′-CH(CH₃)—O-2′ (referred to as “constrained ethyl” or “cEt” when in the S configuration), 4′-CH₂—O—CH₂-2′, 4′-CH₂—N(R)-2′, 4′-CH(CH₂OCH₃)—O-2′ (“constrained MOE” or “cMOE”) and analogs thereof (see, e.g., U.S. Pat. No. 7,399,845), 4′-C(CH₃)(CH₃)—O-2′ and analogs thereof (see, e.g., WO2009/006478), 4′-CH₂—N(OCH₃)-2′ and analogs thereof (see, e.g., WO2008/150729), 4′-CH₂—O—N(CH₃)-2′ (see, e.g., US2004/0171570), 4′-CH₂—C(H)(CH₃)-2′ (see, e.g., Chattopadhyaya, et al., J. Org. Chem., 2009, 74, 118-134), 4′-CH₂—C(═CH₂)-2′ and analogs thereof (see, published PCT International Application WO 2008/154401), 4′-C(RₐR_{b})—N(R)—O-2′, 4′-C(RₐR_{b})—O—N(R)-2′, 4′-CH₂—O—N(R)-2′, and 4′-CH₂—N(R)—O-2′, wherein each R, Rₐ, and R_{b} is, independently, H, a protecting group, or C₁-C₁₂ alkyl (see, e.g. U.S. Pat. No. 7,427,672).

[0424] In certain embodiments, such 4′ to 2′ bridges independently comprise from 1 to 4 linked groups independently selected from: —[C(Rₐ)(R_{b})]ₙ—, —[C(Rₐ)(R_{b})]ₙ—O—, —C(Rₐ)═C(R_{b})—, —C(Rₐ)═N—, —C(═NRₐ)—, —C(═O)—, —C(═S)—, —O—, —Si(Rₐ)₂—, —S(═O)ₓ—, and —N(Rₐ)—;

[0425] wherein:

[0426] x is 0, 1, or 2;

[0427] n is 1, 2, 3, or 4;

[0428] each Rₐ and R_{b} is, independently, H, a protecting group, hydroxyl, C₁-C₁₂ alkyl, substituted C₁-C₁₂ alkyl, C₂-C₁₂ alkenyl, substituted C₂-C₁₂ alkenyl, C₂-C₁₂ alkynyl, substituted C₂-C₁₂ alkynyl, C₅-C₂₀ aryl, substituted C₅-C₂₀ aryl, heterocycle radical, substituted heterocycle radical, heteroaryl, substituted heteroaryl, C₅-C₇ alicyclic radical, substituted C₅-C₇ alicyclic radical, halogen, OJ₁, NJ₁J₂, SJ₁, N₃, COOJ₁, acyl (C(═O)—H), substituted acyl, CN, sulfonyl (S(═O)₂-J₁), or sulfoxyl (S(═O)-J₁); and

[0429] each J₁ and J₂ is, independently, H, C₁-C₁₂ alkyl, substituted C₁-C₁₂ alkyl, C₂-C₁₂ alkenyl, substituted C₂-C₁₂ alkenyl, C₂-C₁₂ alkynyl, substituted C₂-C₁₂ alkynyl, C₅-C₂₀ aryl, substituted C₅-C₂₀ aryl, acyl (C(═O)—H), substituted acyl, a heterocycle radical, a substituted heterocycle radical, C₁-C₁₂ aminoalkyl, substituted C₁-C₁₂ aminoalkyl, or a protecting group.

[0430] Additional bicyclic sugar moieties are known in the art, for example: Freier et al., Nucleic Acids Research, 1997, 25(22), 4429-4443, Albaek et al., J. Org. Chem., 2006, 71, 7731-7740, Singh et al., Chem. Commun., 1998, 4, 455-456; Koshkin et al., Tetrahedron, 1998, 54, 3607-3630; Wahlestedt et al., Proc. Natl. Acad. Sci. U.S.A, 2000, 97, 5633-5638; Kumar et al., Bioorg. Med. Chem. Lett., 1998, 8, 2219-2222; Singh et al., J. Org. Chem., 1998, 63, 10035-10039; Srivastava et al., J. Am. Chem. Soc., 20017, 129, 8362-8379; Elayadi et al., Curr. Opinion Invens. Drugs, 2001, 2, 558-561; Braasch et al., Chem. Biol., 2001, 8, 1-7; Orum et al., Curr. Opinion Mol. Ther., 2001, 3, 239-243; U.S. Pat. Nos. 7,053,207, 6,268,490, 6,770,748, 6,794,499, 7,034,133, 6,525,191, 6,670,461, and 7,399,845; WO 2004/106356, WO 1994/14226, WO 2005/021570, and WO 2007/134181; U.S. Patent Publication Nos. US2004/0171570, US2007/0287831, and US2008/0039618; U.S. patent Ser. Nos. 12/129,154, 60/989,574, 61/026,995, 61/026,998, 61/056,564, 61/086,231, 61/097,787, and 61/099,844; and PCT International Applications Nos. PCT/US2008/064591, PCT/US2008/066154, and PCT/US2008/068922.

[0431] In certain embodiments, bicyclic sugar moieties and nucleosides incorporating such bicyclic sugar moieties are further defined by isomeric configuration. For example, an LNA nucleoside (described above) may be in the α-L configuration or in the β-D configuration.

[chemical structure]

α-L-methyleneoxy (4′-CH₂—O-2′) or α-L-LNA bicyclic nucleosides have been incorporated into oligonucleotides (Frieden et al., Nucleic Acids Research, 2003, 21, 6365-6372). Herein, general descriptions of bicyclic nucleosides include both isomeric configurations. When the positions of specific bicyclic nucleosides (e.g., LNA or cEt) are identified in exemplified embodiments herein, they are in the β-D configuration, unless otherwise specified.

[0432] In certain embodiments, modified sugar moieties comprise one or more non-bridging sugar substituent and one or more bridging sugar substituent (e.g., 5′-substituted and 4′-2′ bridged sugars). (see, e.g., WO 2007/134181, wherein LNA nucleosides are further substituted with, for example, a 5′-methyl or a 5′-vinyl group, and see, e.g., U.S. Pat. Nos. 7,547,684; 7,750,131; 8,030,467; 8,268,980; 7,666, 854; and 8,088,746).

[0433] In certain embodiments, modified sugar moieties are sugar surrogates. In certain such embodiments, the oxygen atom of the sugar moiety is replaced, e.g., with a sulfur, carbon or nitrogen atom. In certain such embodiments, such modified sugar moieties also comprise bridging and/or non-bridging substituents as described above. For example, certain sugar surrogates comprise a 4′-sulfur atom and a substitution at the 2′-position (see, e.g., US2005/0130923) and/or the 5′ position.

[0434] In certain embodiments, sugar surrogates comprise rings having other than 5 atoms. For example, in certain embodiments, a sugar surrogate comprises a six-membered tetrahydropyran (“THP”). Such tetrahydropyrans may be further modified or substituted. Nucleosides comprising such modified tetrahydropyrans include but are not limited to hexitol nucleic acid (“HNA”), anitol nucleic acid (“ANA”), manitol nucleic acid (“MNA”) (see Leumann, C J. Bioorg. & Med. Chem. 2002, 10, 841-854), fluoro HNA:

[chemical structure]

(“F-HNA”, see e.g., U.S. Pat. Nos. 8,088,904; 8,440,803; and 8,796,437, F-HNA can also be referred to as a F-THP or 3′-fluoro tetrahydropyran), and nucleosides comprising additional modified THP compounds having the formula:

[chemical structure]

wherein, independently, for each of said modified THP nucleoside:

[0435] Bx is a nucleobase moiety;

[0436] T₃ and T₄ are each, independently, an internucleoside linking group linking the modified THP nucleoside to the remainder of an oligonucleotide or one of T₃ and T₄ is an internucleoside linking group linking the modified THP nucleoside to the remainder of an oligonucleotide and the other of T₃ and T₄ is H, a hydroxyl protecting group, a linked conjugate group, or a 5′ or 3′-terminal group; q₁, q₂, q₃, q₄, q₅, q₆ and q₇ are each, independently, H, C₁-C₆ alkyl, substituted C₁-C₆ alkyl, C₂-C₆ alkenyl, substituted C₂-C₆ alkenyl, C₂-C₆ alkynyl, or substituted C₂-C₆ alkynyl; and

[0437] each of R₁ and R₂ is independently selected from among: hydrogen, halogen, substituted or unsubstituted alkoxy, NJ₁J₂, SJ₁, N₃, OC(═X)J₁, OC(═X)NJ₁J₂, NJ₃C(═X)NJ₁J₂, and CN, wherein X is O, S or NJ₁, and each J₁, J₂, and J₃ is, independently, H or C₁-C₆ alkyl.

[0438] In certain embodiments, modified THP nucleosides are provided wherein q₁, q₂, q₃, q₄, q₅, q₆ and q₇ are each H. In certain embodiments, at least one of q₁, q₂, q₃, q₄, q₅, q₆ and q₇ is other than H. In certain embodiments, at least one of q₁, q₂, q₃, q₄, q₅, q₆ and q₇ is methyl. In certain embodiments, modified THP nucleosides are provided wherein one of R₁ and R₂ is F. In certain embodiments, R₁ is F and R₂ is H, in certain embodiments, R₁ is methoxy and R₂ is H, and in certain embodiments, R₁ is methoxyethoxy and R₂ is H.

[0439] In certain embodiments, sugar surrogates comprise rings having more than 5 atoms and more than one heteroatom. For example, nucleosides comprising morpholino sugar moieties and their use in oligonucleotides have been reported (see, e.g., Braasch et al., Biochemistry, 2002, 41, 4503-4510 and U.S. Pat. Nos. 5,698,685; 5,166,315; 5,185,444; and 5,034,506). As used here, the term “morpholino” means a sugar surrogate having the following structure:

[chemical structure]

In certain embodiments, morpholinos may be modified, for example by adding or altering various substituent groups from the above morpholino structure. Such sugar surrogates are referred to herein as “modifed morpholinos.”

[0440] In certain embodiments, sugar surrogates comprise acyclic moieites. Examples of nucleosides and oligonucleotieds comprising such acyclic sugar surrogates include but are not limited to: peptide nucleic acid (“PNA”), acyclic butyl nucleic acid (see, e.g., Kumar et al., Org. Biomol. Chem., 2013, 11, 5853-5865), and nucleosides and oligonucleotides described in WO2011/133876.

[0441] Many other bicyclic and tricyclic sugar and sugar surrogate ring systems are known in the art that can be used in modified nucleosides (see, e.g., Leumann, J. C, Bioorganic & Medicinal Chemistry, 2002, 10, 841-854).

[0442] 2. Certain Modified Nucleobases

[0443] In certain embodiments, modified oligonucleotides, such as modified crRNAs, comprise one or more nucleoside comprising an unmodified nucleobase. In certain embodiments, modified oligonucleotides comprise one or more nucleoside comprising a modified nucleobase. In certain embodiments, modified oligonucleotides comprise one or more nucleoside that does not comprise a nucleobase, referred to as an abasic nucleoside.

[0444] In certain embodiments, modified nucleobases are selected from: 5-substituted pyrimidines, 6-azapyrimidines, alkyl or alkynyl substituted pyrimidines, alkyl substituted purines, and N-2, N-6 and O-6 substituted purines. In certain embodiments, modified nucleobases are selected from: 2-aminopropyladenine, 5-hydroxymethyl cytosine, xanthine, hypoxanthine, 2-aminoadenine, 6-N-methylguanine, 6-N-methyladenine, 2-propyladenine, 2-thiouracil, 2-thiothymine and 2-thiocytosine, 5-propynyl (—C≡C—CH₃) uracil, 5-propynylcytosine, 6-azouracil, 6-azocytosine, 6-azothymine, 5-ribosyluracil (pseudouracil), 4-thiouracil, 8-halo, 8-amino, 8-thiol, 8-thioalkyl, 8-hydroxyl, 8-aza and other 8-substituted purines, 5-halo, particularly 5-bromo, 5-trifluoromethyl, 5-halouracil, and 5-halocytosine, 7-methylguanine, 7-methyladenine, 2-F-adenine, 2-aminoadenine, 7-deazaguanine, 7-deazaadenine, 3-deazaguanine, 3-deazaadenine, 6-N-benzoyladenine, 2-N-isobutyrylguanine, 4-N-benzoylcytosine, 4-N-benzoyluracil, 5-methyl 4-N-benzoylcytosine, 5-methyl 4-N-benzoyluracil, universal bases, hydrophobic bases, promiscuous bases, size-expanded bases, and fluorinated bases. Further modified nucleobases include tricyclic pyrimidines, such as 1,3-diazaphenoxazine-2-one, 1,3-diazaphenothiazine-2-one and 9-(2-aminoethoxy)-1,3-diazaphenoxazine-2-one (G-clamp). Modified nucleobases may also include those in which the purine or pyrimidine base is replaced with other heterocycles, for example, 7-deaza-adenine, 7-deazaguanosine, 2-aminopyridine and 2-pyridone. Further nucleobases include those disclosed in U.S. Pat. No. 3,687,808, those disclosed in The Concise Encyclopedia Of Polymer Science And Engineering, Kroschwitz, J. I., Ed., John Wiley & Sons, 1990, 858-859; Englisch et al., Angewandte Chemie, International Edition, 1991, 30, 613; Sanghvi, Y. S., Chapter 15, Antisense Research and Applications, Crooke, S. T. and Lebleu, B., Eds., CRC Press, 1993, 273-288; and those disclosed in Chapters 6 and 15, Antisense Drug Technology, Crooke S. T., Ed., CRC Press, 2008, 163-166 and 442-443.

[0445] Representative United States patents that teach the preparation of certain of the above noted modified nucleobases as well as other modified nucleobases include without limitation, US2003/0158403, U.S. Pat. Nos. 3,687,808; 4,845,205; 5,130,302; 5,134,066; 5,175,273; 5,367,066; 5,432,272; 5,434,257; 5,457,187; 5,459,255; 5,484,908; 5,502,177; 5,525,711; 5,552,540; 5,587,469; 5,594,121; 5,596,091; 5,614,617; 5,645,985; 5,681,941; 5,750,692; 5,763,588; 5,830,653 and 6,005,096.

[0446] B. Certain Modified Internucleoside Linkages

[0447] In certain embodiments, nucleosides of modified oligonucleotides, such as modified crRNAs, may be linked together using any internucleoside linkage. The two main classes of internucleoside linking groups are defined by the presence or absence of a phosphorus atom. Representative phosphorus-containing internucleoside linkages include but are not limited to phosphates, which contain a phosphodiester bond (“P═O”) (also referred to as unmodified or naturally occurring linkages), phosphotriesters, methylphosphonates, phosphoramidates, and phosphorothioates (“P═S”), and phosphorodithioates (“HS—P═S”). Representative non-phosphorus containing internucleoside linking groups include but are not limited to methylenemethylimino (—CH₂—N(CH₃)—O—CH₂—), thiodiester (—O—C(═O)—S—), thionocarbamate (—O—C(═O)(NH)—S—); siloxane (—O—SiH₂—O—); and N,N′-dimethylhydrazine (—CH₂—N(CH₃)—N(CH₃)—). Modified internucleoside linkages, compared to naturally occurring phosphate linkages, can be used to alter, typically increase, nuclease resistance of the oligonucleotide. In certain embodiments, internucleoside linkages having a chiral atom can be prepared as a racemic mixture, or as separate enantiomers. Representative chiral internucleoside linkages include but are not limited to alkylphosphonates and phosphorothioates. Methods of preparation of phosphorous-containing and non-phosphorous-containing internucleoside linkages are well known to those skilled in the art.

[0448] Neutral internucleoside linkages include, without limitation, phosphotriesters, methylphosphonates, MMI (3′-CH₂—N(CH₃)—O-5′), amide-3 (3′-CH₂—C(═O)—N(H)-5′), amide-4 (3′-CH₂—N(H)—C(═O)-5′), formacetal (3′-O—CH₂—O-5′), methoxypropyl, and thioformacetal (3′-S—CH₂—O-5′). Further neutral internucleoside linkages include nonionic linkages comprising siloxane (dialkylsiloxane), carboxylate ester, carboxamide, sulfide, sulfonate ester and amides (See for example: Carbohydrate Modifications in Antisense Research; Y. S. Sanghvi and P. D. Cook, Eds., ACS Symposium Series 580; Chapters 3 and 4, 40-65). Further neutral internucleoside linkages include nonionic linkages comprising mixed N, O, S and CH₂ component parts.

[0449] C. Certain Conjugate Groups and Terminal Groups

[0450] In certain embodiments, oligonucleotides for use as crRNA further comprise conjugate groups and/or terminal groups. In certain embodiments, compounds comprising oligonucleotides for use as crRNA further comprise a conjugate group or terminal group. In certain such embodiments, oligonucleotides are covalently attached to one or more conjugate group. In certain embodiments, conjugate groups modify one or more properties of the attached oligonucleotide, including but not limited to pharmacodynamics, pharmacokinetics, stability, binding, absorption, cellular distribution, cellular uptake, charge and clearance. In certain embodiments, conjugate groups impart a new property on the attached oligonucleotide, e.g., fluorophores or reporter groups that enable detection of the oligonucleotide. Conjugate groups and/or terminal groups may be added to oligonucleotides having any of the modifications or motifs described above.

[0451] Conjugate groups include, without limitation, intercalators, reporter molecules, polyamines, polyamides, peptides, carbohydrates, vitamin moieties, polyethylene glycols, thioethers, polyethers, cholesterols, thiocholesterols, cholic acid moieties, folate, lipids, phospholipids, biotin, phenazine, phenanthridine, anthraquinone, adamantane, acridine, fluoresceins, rhodamines, coumarins, fluorophores, and dyes. Certain conjugate groups have been described previously, for example: cholesterol moiety (Letsinger et al., Proc. Natl. Acad. Sci. USA, 1989, 86, 6553-6556), cholic acid (Manoharan et al., Bioorg. Med. Chem. Lett., 1994, 4, 1053-1060), a thioether, e.g., hexyl-S-tritylthiol (Manoharan et al., Ann. N.Y. Acad. Sci., 1992, 660, 306-309; Manoharan et al., Bioorg. Med. Chem. Let., 1993, 3, 2765-2770), a thiocholesterol (Oberhauser et al., Nucl. Acids Res., 1992, 20, 533-538), an aliphatic chain, e.g., do-decan-diol or undecyl residues (Saison-Behmoaras et al., EMBO J., 1991, 10, 1111-1118; Kabanov et al., FEBS Lett., 1990, 259, 327-330; Svinarchuk et al., Biochimie, 1993, 75, 49-54), a phospholipid, e.g., di-hexadecyl-rac-glycerol or triethyl-ammonium 1,2-di-O-hexadecyl-rac-glycero-3-H-phosphonate (Manoharan et al., Tetrahedron Lett., 1995, 36, 3651-3654; Shea et al., Nucl. Acids Res., 1990, 18, 3777-3783), a polyamine or a polyethylene glycol chain (Manoharan et al., Nucleosides & Nucleotides, 1995, 14, 969-973), or adamantane acetic acid (Manoharan et al., Tetrahedron Lett., 1995, 36, 3651-3654), a palmityl moiety (Mishra et al., Biochim. Biophys. Acta, 1995, 1264, 229-237), an octadecylamine or hexylamino-carbonyl-oxycholesterol moiety (Crooke et al., J. Pharmacol. Exp. Ther., 1996, 277, 923-937), a tocopherol group (Nishina et al., Molecular Therapy Nucleic Acids, 2015, 4, e220; doi: 10.1038/mtna.2014.72 and Nishina et al., Molecular Therapy, 2008, 16, 734-740), or a GalNAc cluster (e.g., WO2014/179620).

[0452] In certain embodiments, a conjugate group comprises an active drug substance, for example, aspirin, warfarin, phenylbutazone, ibuprofen, suprofen, fen-bufen, ketoprofen, (S)-(+)-pranoprofen, carprofen, dansylsarcosine, 2,3,5-triiodobenzoic acid, fingolimod, flufenamic acid, folinic acid, a benzothiadiazide, chlorothiazide, a diazepine, indo-methicin, a barbiturate, a cephalosporin, a sulfa drug, an antidiabetic, an antibacterial or an antibiotic.

[0453] Conjugate groups are attached directly or via an optional conjugate linker to a parent compound, such as a crRNA oligonucleotide. In certain embodiments, conjugate groups are directly attached to oligonucleotides. In certain embodiments, conjugate groups are indirectly attached to oligonucleotides via conjugate linkers. In certain embodiments, the conjugate linker comprises a chain structure, such as a hydrocarbyl chain, or an oligomer of repeating units such as ethylene glycol or amino acid units. In certain embodiments, conjugate groups comprise a cleavable moiety. In certain embodiments, conjugate groups are attached to oligonucleotides via a cleavable moiety. In certain embodiments, conjugate linkers comprise a cleavable moiety. In certain such embodiments, conjugate linkers are attached to oligonucleotides via a cleavable moiety.

[0454] In certain embodiments, a conjugate linker comprises one or more groups selected from alkyl, amino, oxo, amide, disulfide, polyethylene glycol, ether, thioether, and hydroxylamino. In certain such embodiments, the conjugate linker comprises groups selected from alkyl, amino, oxo, amide and ether groups. In certain embodiments, the conjugate linker comprises groups selected from alkyl and amide groups. In certain embodiments, the conjugate linker comprises groups selected from alkyl and ether groups. In certain embodiments, the conjugate linker comprises at least one phosphorus moiety. In certain embodiments, the conjugate linker comprises at least one phosphate group. In certain embodiments, the conjugate linker includes at least one neutral linking group.

[0455] In certain embodiments, conjugate linkers, including the conjugate linkers described above, are bifunctional linking moieties, e.g., those known in the art to be useful for attaching conjugate groups to parent compounds, such as the crRNA oligonucleotides provided herein. In general, a bifunctional linking moiety comprises at least two functional groups. One of the functional groups is selected to bind to a particular site on a parent compound and the other is selected to bind to a conjugate group. Examples of functional groups used in a bifunctional linking moiety include but are not limited to electrophiles for reacting with nucleophilic groups and nucleophiles for reacting with electrophilic groups. In certain embodiments, bifunctional linking moieties comprise one or more groups selected from amino, hydroxyl, carboxylic acid, thiol, alkyl, alkenyl, and alkynyl.

[0456] Examples of conjugate linkers include but are not limited to pyrrolidine, 8-amino-3,6-dioxaoctanoic acid (ADO), succinimidyl 4-(N-maleimidomethyl) cyclohexane-1-carboxylate (SMCC) and 6-aminohexanoic acid (AHEX or AHA). Other conjugate linkers include but are not limited to substituted or unsubstituted C₁-C₁₀ alkyl, substituted or unsubstituted C₂-C₁₀ alkenyl or substituted or unsubstituted C₂-C₁₀ alkynyl, wherein a nonlimiting list of preferred substituent groups includes hydroxyl, amino, alkoxy, carboxy, benzyl, phenyl, nitro, thiol, thioalkoxy, halogen, alkyl, aryl, alkenyl and alkynyl.

[0457] In certain embodiments, a cleavable moiety is a cleavable bond. In certain embodiments, a cleavable moiety comprises a cleavable bond. In certain embodiments, a cleavable moiety is a group of atoms comprising at least one cleavable bond. In certain embodiments, a cleavable moiety comprises a group of atoms having one, two, three, four, or more than four cleavable bonds. In certain embodiments, a cleavable moiety is selectively cleaved inside a cell or subcellular compartment, such as a lysosome. In certain embodiments, a cleavable moiety is selectively cleaved by endogenous enzymes, such as nucleases.

[0458] In certain embodiments, a cleavable bond is selected from among: an amide, an ester, an ether, one or both esters of a phosphodiester, a phosphate ester, a carbamate, or a disulfide. In certain embodiments, a cleavable bond is one or both of the esters of a phosphodiester. In certain embodiments, a cleavable moiety comprises a phosphate or phosphodiester. In certain embodiments, the cleavable moiety is a phosphate linkage between an oligonucleotide and a conjugate linker or conjugate group.

[0459] Conjugate groups may be attached to either or both ends of an oligonucleotide and/or at any internal position. In certain embodiments, conjugate groups are attached to the 2′-position of a nucleoside of a modified oligonucleotide. In certain embodiments, conjugate groups that are attached to either or both ends of an oligonucleotide are terminal groups. In certain such embodiments, conjugate groups or terminal groups are attached at the 3′ and/or 5′-end of oligonucleotides. In certain such embodiments, conjugate groups (or terminal groups) are attached at the 3′-end of oligonucleotides. In certain embodiments, conjugate groups are attached near the 3′-end of oligonucleotides. In certain embodiments, conjugate groups (or terminal groups) are attached at the 5′-end of oligonucleotides. In certain embodiments, conjugate groups are attached near the 5′-end of oligonucleotides.

[0460] Examples of terminal groups include but are not limited to conjugate groups, capping groups, phosphate moieties, protecting groups, modified or unmodified nucleosides, and two or more nucleosides that are independently modified or unmodified.

[0461] In certain embodiments, a conjugate group is a cell-targeting moiety. In certain embodiments, a conjugate group, optional conjugate linker, and optional cleavable moiety have the general formula:

[chemical structure]

[0462] wherein n is from 1 to about 3, m is 0 when n is 1, m is 1 when n is 2 or greater, j is 1 or 0, and k is 1 or 0.

[0463] In certain embodiments, n is 1, j is 1 and k is 0. In certain embodiments, n is 1, j is 0 and k is 1. In certain embodiments, n is 1, j is 1 and k is 1. In certain embodiments, n is 2, j is 1 and k is 0. In certain embodiments, n is 2, j is 0 and k is 1. In certain embodiments, n is 2, j is 1 and k is 1. In certain embodiments, n is 3, j is 1 and k is 0. In certain embodiments, n is 3, j is 0 and k is 1. In certain embodiments, n is 3, j is 1 and k is 1.

[0464] In certain embodiments, conjugate groups comprise cell-targeting moieties that have at least one tethered ligand. In certain embodiments, cell-targeting moieties comprise two tethered ligands covalently attached to a branching group. In certain embodiments, cell-targeting moieties comprise three tethered ligands covalently attached to a branching group.

[0465] In certain embodiments, the cell-targeting moiety comprises a branching group comprising one or more groups selected from alkyl, amino, oxo, amide, disulfide, polyethylene glycol, ether, thioether and hydroxylamino groups. In certain embodiments, the branching group comprises a branched aliphatic group comprising groups selected from alkyl, amino, oxo, amide, disulfide, polyethylene glycol, ether, thioether and hydroxylamino groups. In certain such embodiments, the branched aliphatic group comprises groups selected from alkyl, amino, oxo, amide and ether groups. In certain such embodiments, the branched aliphatic group comprises groups selected from alkyl, amino and ether groups. In certain such embodiments, the branched aliphatic group comprises groups selected from alkyl and ether groups. In certain embodiments, the branching group comprises a mono or polycyclic ring system.

[0466] In certain embodiments, each tether of a cell-targeting moiety comprises one or more groups selected from alkyl, substituted alkyl, ether, thioether, disulfide, amino, oxo, amide, phosphodiester, and polyethylene glycol, in any combination. In certain embodiments, each tether is a linear aliphatic group comprising one or more groups selected from alkyl, ether, thioether, disulfide, amino, oxo, amide, and polyethylene glycol, in any combination. In certain embodiments, each tether is a linear aliphatic group comprising one or more groups selected from alkyl, phosphodiester, ether, amino, oxo, and amide, in any combination. In certain embodiments, each tether is a linear aliphatic group comprising one or more groups selected from alkyl, ether, amino, oxo, and amid, in any combination. In certain embodiments, each tether is a linear aliphatic group comprising one or more groups selected from alkyl, amino, and oxo, in any combination. In certain embodiments, each tether is a linear aliphatic group comprising one or more groups selected from alkyl and oxo, in any combination. In certain embodiments, each tether is a linear aliphatic group comprising one or more groups selected from alkyl and phosphodiester, in any combination. In certain embodiments, each tether comprises at least one phosphorus linking group or neutral linking group. In certain embodiments, each tether comprises a chain from about 6 to about 20 atoms in length. In certain embodiments, each tether comprises a chain from about 10 to about 18 atoms in length. In certain embodiments, each tether comprises about 10 atoms in chain length.

[0467] In certain embodiments, each ligand of a cell-targeting moiety has an affinity for at least one type of receptor on a target cell. In certain embodiments, each ligand has an affinity for at least one type of receptor on the surface of a mammalian liver cell. In certain embodiments, each ligand has an affinity for the hepatic asialoglycoprotein receptor (ASGP-R). In certain embodiments, each ligand is a carbohydrate. In certain embodiments, each ligand is, independently selected from galactose, N-acetyl galactoseamine (GalNAc), mannose, glucose, glucoseamine and fucose. In certain embodiments, each ligand is N-acetyl galactoseamine (GalNAc). In certain embodiments, the cell-targeting moiety comprises 3 GalNAc ligands. In certain embodiments, the cell-targeting moiety comprises 2 GalNAc ligands. In certain embodiments, the cell-targeting moiety comprises 1 GalNAc ligand.

[0468] Certain Pharmaceutical Compositions

[0469] In certain embodiments, the present invention provides pharmaceutical compositions comprising one or more crRNA. In certain embodiments, such pharmaceutical composition comprises a tracrRNA. In certain embodiments, the pharmaceutical composition comprises a means of expressing a CRISPR nuclease. In certain embodiments, such means of expressing the CRISPR nuclease is a plasmid or a viral vector. In certain such embodiments, the pharmaceutical composition comprises a suitable pharmaceutically acceptable diluent or carrier. In certain embodiments, a pharmaceutical composition comprises a modified crRNA. In certain such embodiments, the modified crRNA is a component of a ribonucleoprotein particle or or complex (RNP). In certain such embodiments, the RNP also comprises a nuclease. In certain such embodiments, the nuclease is a Cpf1 nuclease. In certain embodiments, a pharmaceutical composition comprises a liposome or lipid nanoparticle. In certain such embodiments, the liposome or lipid nanoparticle contains the modified crRNA. In certain such embodiments, the liposome or lipid nanoparticle contains an mRNA encoding a Cpf1 nuclease. In certain embodiments, a pharmaceutical composition comprises a sterile saline solution and one or more antisense compound. In certain embodiments, such pharmaceutical composition consists of a sterile saline solution and one or more antisense compound. In certain embodiments, the sterile saline is pharmaceutical grade saline. In certain embodiments, a pharmaceutical composition comprises one or more antisense compound and sterile water. In certain embodiments, a pharmaceutical composition consists of one antisense compound and sterile water. In certain embodiments, the sterile water is pharmaceutical grade water. In certain embodiments, a pharmaceutical composition comprises one or more antisense compound and phosphate-buffered saline (PBS). In certain embodiments, a pharmaceutical composition consists of one or more antisense compound and sterile PBS. In certain embodiments, the sterile PBS is pharmaceutical grade PBS.

### Nonlimiting Disclosure and Incorporation by Reference

[0470] While certain compounds, compositions and methods described herein have been described with specificity in accordance with certain embodiments, the following examples serve only to illustrate the compounds described herein and are not intended to limit the same. Each of the references, GenBank accession numbers, and the like recited in the present application is incorporated herein by reference in its entirety.

[0471] Although the sequence listing accompanying this filing identifies each sequence as either “RNA” or “DNA” as required, in reality, those sequences may be modified with any combination of chemical modifications. One of skill in the art will readily appreciate that such designation as “RNA” or “DNA” to describe modified oligonucleotides is, in certain instances, arbitrary. For example, an oligonucleotide comprising a nucleoside comprising a 2′-OH sugar moiety and a thymine base could be described as a DNA having a modified sugar (2′-OH for the natural 2′-H of DNA) or as an RNA having a modified base (thymine (methylated uracil) for natural uracil of RNA).

[0472] Accordingly, nucleic acid sequences provided herein, including, but not limited to those in the sequence listing, are intended to encompass nucleic acids containing any combination of natural or modified RNA and/or DNA, including, but not limited to such nucleic acids having modified nucleobases. By way of further example and without limitation, an oligomeric compound having the nucleobase sequence “ATCGATCG” encompasses any oligomeric compounds having such nucleobase sequence, whether modified or unmodified, including, but not limited to, such compounds comprising RNA bases, such as those having sequence “AUCGAUCG” and those having some DNA bases and some RNA bases such as “AUCGATCG” and oligomeric compounds having other modified or naturally occurring bases, such as “AT^{m}CGAUCG,” wherein ^{m}C indicates a cytosine base comprising a methyl group at the 5-position.

### EXAMPLES

[0473] The following examples illustrate certain embodiments of the present invention and are not limiting. Moreover, where specific embodiments are provided, the inventors have contemplated generic application of those specific embodiments. For example, disclosure of an oligonucleotide having a particular motif provides reasonable support for additional oligonucleotides having the same or similar motif. And, for example, where a particular high-affinity modification appears at a particular position, other high-affinity modifications at the same position are considered suitable, unless otherwise indicated.

### Example 1: Gene Editing Effects of Truncated crRNAs

[0474] Truncated crRNAs comprising a target recognition portion that is complementary to DNA (cytosine-5)-methyltransferase 1 (DNMT1) were designed and synthesized to test their effects on gene editing of DNMT1. HEK293T cells were transfected with a plasmid encoding Cpf1 and a double-stranded gblock (IDT, Coralville, Iowa) encoding a crRNA listed in the table below. 48 hours later, genomic DNA was isolated from cells and used in a SURVEYOR assay (Integrated DNA Technologies) according to the manufacturer's directions. The PCR primers used to amplify the crRNA target site in the DNMT1 gene were forward: 5′-CTGGGACTCAGGCGGGTCAC-3′ (SEQ ID NO: 1) and reverse: 5′-CCTCACACAACAGCTTCATGTCAGC-3′ (SEQ ID NO: 2). Following Cell cleavage, the DNA was run on a gel. Gene editing of DNMT1 was evaluated by measuring the extent of non-homologous end joining (NHEJ) within DMT1. Quantification of the bands in the gel was performed using Image J software, and the NHEJ incidence percentage was calculated using the following formula: NHEJ (%)=100×(1-(fraction cut of target gene)^{0.5}), wherein the fraction cut of the target gene was determined by dividing the fluorescent signal of the cut target gene fragment(s) by the total fluorescent signal of the cut and intact target gene fragment(s). The NHEJ incidence for each truncated crRNA was normalized to the NHEJ incidence of the positive control, full-length crRNA 002, and the normalized value was referred to as the gene disruption percentage. The results, shown in the table below, indicate that multiple truncated crRNAs edited the target gene. An entry of “n.d.” indicates no data due to the lack of detectable cleavage bands in the gel.

TABLE 1
crRNAs targeting DNMT1

| | | | | Normalized | |
|---|---|---|---|---|---|
| | | | | gene | SEQ |
| | | | | disruption | ID |
| Name | | Sequence (5′ to 3′) | Length | (%) | NO. |
| 002 | 1090808 | UAAUUUCUACUCUUGUAGAUCUGAUGGUCCA | 43 | 100 | 18 |
| | | UGUCUGUUACUC | | | |
| 005 | 1091140 | UUCUACUCUUGUAGAUCUGAUGGUCCAUGUC | 39 | n.d. | 19 |
| | | UGUUACUC | | | |
| 006 | 1091141 | UAAUUUCUACUCUUGUAGAUCUGAUGGUCCA | 40 | 102 | 20 |
| | | UGUCUGUUA | | | |
| 007 | 1091142 | UUCUACUCUUGUAGAUCUGAUGGUCCAUGUC | 34 | n.d. | 21 |
| | | UGU | | | |
| 008 | 1090812 | UAAUUUCUACUCUUGUAGAUCUGAUGGUCCA | 38 | 90 | 22 |
| | | UGUCUGU | | | |
| 009 | 1091143 | UUCUACUCUUGUAGAUCUGAUGGUCCAUGUC | 36 | n.d. | 23 |
| | | UGUUA | | | |
| 010 | 1090813 | AAUUUCUACUCUUGUAGAUCUGAUGGUCCAU | 37 | 84 | 24 |
| | | GUCUGU | | | |
| 1034621 | 1034621 | AUUUCUACUCUUGUAGAUCUGAUGGUCCAUG | 36 | 60 | 25 |
| | | UCUGU | | | |
| 012 | 1090814 | UUUCUACUCUUGUAGAUCUGAUGGUCCAUGU | 35 | 17 | 26 |
| | | CUGU | | | |
| 013 | 1090809 | AAUUUCUACUCUUGUAGAUCUGAUGGUCCAU | 42 | 99 | 27 |
| | | GUCUGUUACUC | | | |
| 014 | 1090810 | AUUUCUACUCUUGUAGAUCUGAUGGUCCAUG | 41 | 65 | 28 |
| | | UCUGUUACUC | | | |
| 015 | 1090811 | UUUCUACUCUUGUAGAUCUGAUGGUCCAUGU | 40 | 20 | 29 |
| | | CUGUUACUC | | | |

[0475] All of the nucleosides in the table above are unmodified ribonucleosides comprising 2-hydroxy sugar moieties, and all of the internucleoside linkages in the table above are phosphate internucleoside linkages. The underlined portion of each crRNA is the target recognition portion, and the portion that is not underlined is the CRISPR recognition portion of each crRNA. In Table 1, the CRISPR recognition portions of the crRNAs recognize Cpf1.

### Example 2: Gene Editing Effects of Modified crRNAs

[0476] Modified crRNAs comprising a target recognition portion that is complementary to DNMT1 were designed and synthesized to test their effects on gene editing of DNMT1. HEK293T cells were transfected with a plasmid encoding Cpf1 using Lipofectamine 3000 (Life Technologies, Carlsbad, Calif.). The next morning, the cells were transfected with a modified crRNA listed in the table below using Lipofectamine RNAi max (Life Technologies). 24 hours later, genomic DNA was isolated from cells and analyzed as described in Example 1 in order to determine the extent of gene editing of DNMT1. The NHEJ incidence for each modified crRNA was normalized to the NHEJ incidence observed for crRNA 1034621, which was also tested in Example 1. The normalized values are referred to as the gene disruption percentages. The results, shown in the table below, indicate that multiple modified crRNAs edited the target gene. An entry of “n.d.” indicates no data due to the lack of detectable cleavage bands in the gel.

TABLE 2
crRNAs targeting DNMT1

| | | | (Normalized) | SEQ |
|---|---|---|---|---|
| | | | gene | ID |
| Name | Sequence (5′ to 3′) | Length | disruption (%) | NO. |
| 1034621 | AᵣₒUᵣₒUᵣₒUᵣₒCᵣₒUᵣₒAᵣₒCᵣₒUᵣₒCᵣₒUᵣₒUᵣₒGᵣₒUᵣₒAᵣₒGᵣₒAᵣₒUᵣₒCᵣₒUᵣₒGᵣₒAᵣₒ | 36 | 100 | 25 |
| | UᵣₒGᵣₒGᵣₒUᵣₒCᵣₒCᵣₒAᵣₒUᵣₒGᵣₒUᵣₒCᵣₒUᵣₒGᵣₒUᵣ | | | |
| 1038257 | AᵣₛUᵣₛUᵣₛUᵣₛCᵣₛUᵣₛAᵣₛCᵣₛUᵣₛCᵣₛUᵣₛUᵣₛGᵣₛUᵣₛAᵣₛGᵣₛAᵣₛUᵣₛCᵣₛUᵣₛGᵣₛAᵣₛUᵣₛ | 36 | n..d. | 25 |
| | GᵣₛGᵣₛUᵣₛCᵣₛCᵣₛAᵣₛUᵣₛGᵣₛUᵣₛCᵣₛUᵣₛGᵣₛUᵣ | | | |
| 1038259 | AₘₒUᵣₒUᵣₒUᵣₒCᵣₒUᵣₒAᵣₒCᵣₒUᵣₒCᵣₒUᵣₒUᵣₒGᵣₒUᵣₒAᵣₒGᵣₒAᵣₒUᵣₒCᵣₒUᵣₒGᵣₒAᵣₒ | 36 | n.d. | 25 |
| | UᵣₒGᵣₒGᵣₒUᵣₒCᵣₒCᵣₒAᵣₒUᵣₒGᵣₒUᵣₒCᵣₒUᵣₒGᵣₒUᵣ | | | |
| 1038260 | AᵣₒUᵣₒUᵣₒUᵣₒCᵣₒUᵣₒAᵣₒCᵣₒUᵣₒCᵣₒUᵣₒUᵣₒGᵣₒUᵣₒAᵣₒGᵣₒAᵣₒUᵣₒCᵣₒUᵣₒGᵣₒAᵣₒ | 36 | 108 | 25 |
| | UᵣₒGᵣₒGᵣₒUᵣₒCᵣₒCᵣₒAᵣₒUᵣₒGᵣₒUᵣₒCᵣₒUᵣₒGᵣₒUₘ | | | |
| 1038261 | AₘₒUᵣₒUᵣₒUᵣₒCᵣₒUᵣₒAᵣₒCᵣₒUᵣₒCᵣₒUᵣₒUᵣₒGᵣₒUᵣₒAᵣₒGᵣₒAᵣₒUᵣₒCᵣₒUᵣₒGᵣₒAᵣₒ | 36 | n.d. | 25 |
| | UᵣₒGᵣₒGᵣₒUᵣₒCᵣₒCᵣₒAᵣₒUᵣₒGᵣₒUᵣₒCᵣₒUᵣₒGᵣₒUₘ | | | |

A subscript “m” indicates a 2′-O-methyl modification. A subscript “r” indicates an unmodified, 2′-hydroxy sugar moiety. A subscript “o” indicates a phosphate internucleoside linkage, and a subscript “s” indicates a phosphorothioate internucleoside linkage. The underlined portion of each crRNA is the target recognition portion, and the portion that is not underlined is the CRISPR recognition portion of the crRNA. In the table above, the CRISPR recognition portions of the crRNAs recognize Cpf1.

### Example 3: Gene Editing Effects of Modified crRNAs

[0477] Modified crRNAs comprising a target recognition portion that is complementary to DNMT1 were designed and synthesized to test their effects on gene editing of DNMT1. HEK293T cells were transfected as described in Example 2, except the modified crRNAs are listed in the table below. Genomic DNA was isolated and analyzed as described in Example 1. The NHEJ incidence for each modified crRNA was normalized to the NHEJ incidence observed for crRNA 1034621, which was also tested in Examples 1 and 2. The normalized values are referred to as the gene disruption percentages. The results, shown in the table below, indicate that modified crRNAs edited the target gene. Nearly all of the modified crRNAs in the table below edited the target gene with greater efficacy than the unmodified control (crRNA 1034621).

TABLE 3
crRNAs targeting DNMT1

| | | | (Normalized) | SEQ |
|---|---|---|---|---|
| | | | gene | ID |
| Name | Sequence (5′ to 3′) | Length | disruption (%) | NO. |
| 1034621 | AᵣₒUᵣₒUᵣₒUᵣₒCᵣₒUᵣₒAᵣₒCᵣₒUᵣₒCᵣₒUᵣₒUᵣₒGᵣₒUᵣₒAᵣₒGᵣₒAᵣₒUᵣₒCᵣₒUᵣₒGᵣₒAᵣₒ | 36 | 100 | 25 |
| | UᵣₒGᵣₒGᵣₒUᵣₒCᵣₒCᵣₒAᵣₒUᵣₒGᵣₒUᵣₒCᵣₒUᵣₒGᵣₒUᵣ | | | |
| 1038268 | AᵣₒUᵣₒUᵣₒUᵣₒCᵣₒUᵣₒAᵣₒCᵣₒUᵣₒCᵣₒUᵣₒUᵣₒGᵣₒUᵣₒAᵣₒGᵣₒAᵣₒUᵣₒCᵣₒUᵣₒGᵣₒAᵣₒ | 36 | 141 | 25 |
| | UᵣₒGᵣₒGᵣₒUᵣₒCᵣₒCᵣₒAᵣₒUᵣₒGᵣₒUᵣₒCᵣₒUᵣₒGᵣₛUₘ | | | |
| 1038269 | AᵣₒUᵣₒUᵣₒUᵣₒCᵣₒUᵣₒAᵣₒCᵣₒUᵣₒCᵣₒUᵣₒUᵣₒGᵣₒUᵣₒAᵣₒGᵣₒAᵣₒUᵣₒCᵣₒUᵣₒGᵣₒAᵣₒ | 36 | 148 | 25 |
| | UᵣₒGᵣₒGᵣₛUᵣₒCᵣₛCᵣₒAᵣₛUᵣₒGᵣₛUᵣₒCisUᵣₒGᵣₛUₘ | | | |
| 1038270 | AᵣₒUᵣₒUᵣₒUᵣₒCᵣₒUᵣₒAᵣₒCᵣₒUᵣₒCᵣₒUᵣₒUᵣₒGᵣₒUᵣₒAᵣₒGᵣₒAᵣₒUᵣₒCᵣₒUᵣₒGᵣₒAᵣₒ | 36 | 109 | 25 |
| | UᵣₒGᵣₒGᵣₒUᵣₒCᵣₒCᵣₒAᵣₒUᵣₒGᵣₒUᵣₒCᵣₒUᵣₒGₘₒUₘ | | | |
| 1038271 | AᵣₒUᵣₒUᵣₒUᵣₒCᵣₒUᵣₒAᵣₒCᵣₒUᵣₒCᵣₒUᵣₒUᵣₒGᵣₒUᵣₒAᵣₒGᵣₒAᵣₒUᵣₒCᵣₒUᵣₒGᵣₒAᵣₒ | 36 | 141 | 25 |
| | UᵣₒGᵣₒGᵣₒUᵣₒCᵣₒCᵣₒAᵣₒUᵣₒGᵣₒUᵣₒCᵣₒUₘₒGₘₒUₘ | | | |
| 1038272 | UᵣₒAᵣₒAᵣₒUᵣₒUᵣₒUᵣₒCᵣₒUᵣₒAᵣₒCᵣₒUᵣₒCᵣₒUᵣₒUᵣₒGᵣₒUᵣₒAᵣₒGᵣₒAᵣₒUᵣₒCᵣₒUᵣₒ | 38 | 152 | 22 |
| | GᵣₒAᵣₒUᵣₒGᵣₒGᵣₒUᵣₒCᵣₒCᵣₒAᵣₒUᵣₒGᵣₒUᵣₒCᵣₒUᵣₒGᵣₒUₘ | | | |
| 1038273 | UₘₒAᵣₒAᵣₒUᵣₒUᵣₒUᵣₒCᵣₒUᵣₒAᵣₒCᵣₒUᵣₒCᵣₒUᵣₒUᵣₒGᵣₒUᵣₒAᵣₒGᵣₒAᵣₒUᵣₒCᵣₒUᵣₒ | 38 | 88 | 22 |
| | GᵣₒAᵣₒUᵣₒGᵣₒGᵣₒUᵣₒCᵣₒCᵣₒAᵣₒUᵣₒGᵣₒUᵣₒCᵣₒUᵣₒGᵣₒUₘ | | | |
| 1038274 | UₘₛAᵣₒAᵣₒUᵣₒUᵣₒUᵣₒCᵣₒUᵣₒAᵣₒCᵣₒUᵣₒCᵣₒUᵣₒUᵣₒGᵣₒUᵣₒAᵣₒGᵣₒAᵣₒUᵣₒCᵣₒUᵣₒ | 38 | 109 | 22 |
| | GᵣₒAᵣₒUᵣₒGᵣₒGᵣₒUᵣₒCᵣₒCᵣₒAᵣₒUᵣₒGᵣₒUᵣₒCᵣₒUᵣₒGᵣₒUₘ | | | |
| 1038275 | CᵣₒUᵣₒUᵣₒAᵣₒAᵣₒUᵣₒUᵣₒUᵣₒCᵣₒUᵣₒAᵣₒCᵣₒUᵣₒCᵣₒUᵣₒUᵣₒGᵣₒUᵣₒAᵣₒGᵣₒAᵣₒUᵣₒ | 40 | 169 | 30 |
| | CᵣₒUᵣₒGᵣₒAᵣₒUᵣₒGᵣₒGᵣₒUᵣₒCᵣₒCᵣₒAᵣₒUᵣₒGᵣₒUᵣₒCᵣₒUᵣₒGᵣₒUₘ | | | |
| 1038276 | CₘₛUᵣₛUᵣₒAᵣₒAᵣₒUᵣₒUᵣₒUᵣₒCᵣₒUᵣₒAᵣₒCᵣₒUᵣₒCᵣₒUᵣₒUᵣₒGᵣₒUᵣₒAᵣₒGᵣₒAᵣₒUᵣₒ | 40 | 144 | 30 |
| | CᵣₒUᵣₒGᵣₒAᵣₒUᵣₒGᵣₒGᵣₒUᵣₒCᵣₒCᵣₒAᵣₒUᵣₒGᵣₒUᵣₒCᵣₒUᵣₒGᵣₒUₘ | | | |
| 990509 | CₘₛUᵣₛUᵣₒAᵣₒAᵣₒUᵣₒUᵣₒUᵣₒCᵣₒUᵣₒAᵣₒCᵣₒUᵣₒCᵣₒUᵣₒUᵣₒGᵣₒUᵣₒAᵣₒGᵣₒAᵣₒUᵣₒ | 40 | 165 | 30 |
| | CᵣₒUᵣₒGᵣₒAᵣₒUᵣₒGᵣₒGᵣₒUᵣₒCᵣₒCᵣₒAᵣₒUᵣₒGᵣₒUᵣₒCᵣₒUᵣₛGᵣₛUₘ | | | |

A subscript “m” indicates a 2′-O-methyl modification. A subscript “r” indicates an unmodified, 2′-hydroxy sugar moiety. A subscript “o” indicates a phosphate internucleoside linkage, and a subscript “s” indicates a phosphorothioate internucleoside linkage. The underlined portion of each crRNA is the target recognition portion, and the bolded nucleosides are linker nucleosides. The portion that is neither bold nor underlined is the CRISPR recognition portion of each crRNA. In the table above, the CRISPR recognition portions of the crRNAs recognize Cpf1. Modified crRNAs 1038273, 1038274, 1038276 and 990509 are 5′-stabilized. The CRISPR recognition portions of crRNAs 1038273 and 1038274 comprise one or more 5′-stabilizing modifications. The linker nucleosides of crRNAs 1038276 and 990509 comprise one or more 5′-stabilizing modifications.

### Example 4: Gene Editing Effects of Modified crRNAs

[0478] Modified crRNAs comprising a target recognition portion that is complementary to DNMT1 were designed and synthesized to test their effects on gene editing of DNMT1. HEK293T cells were transfected as described in Example 2, except the modified crRNAs are listed in the table below. Genomic DNA was isolated and analyzed as described in Example 1. The NHEJ incidence for each modified crRNA was normalized to the NHEJ incidence observed for crRNA 1038299, which had the highest activity of those tested in this experiment. The normalized values are referred to as the gene disruption percentages. The

TABLE 4
crRNAs targeting DNMT1

| | | | (Normalized) | SEQ |
|---|---|---|---|---|
| | | | gene | ID |
| Name | Sequence (5′ to 3′) | Length | disruption (%) | NO. |
| 1038292 | CₘₛUₘₛUᵣₒAᵣₒAᵣₒUᵣₒUᵣₒUᵣₒCᵣₒUᵣₒAᵣₒCᵣₒUᵣₒCᵣₒUᵣₒUᵣₒGᵣₒUᵣₒAᵣₒGᵣₒAᵣₒUᵣₒ | 40 | 39 | 30 |
| | CᵣₒUᵣₒGᵣₒAᵣₒUᵣₒGᵣₒGᵣₒUᵣₒCᵣₒCᵣₒAᵣₒUᵣₒGᵣₒUᵣₒCᵣₒUᵣₛGₘₛUₘ | | | |
| 1038293 | CₘₛUᵣₛUᵣₒAᵣₒAᵣₒUᵣₒUᵣₒUᵣₒCᵣₒUᵣₒAᵣₒCᵣₒUᵣₒCᵣₒUᵣₒUᵣₒGᵣₒUᵣₒAᵣₒGᵣₒAᵣₒUᵣₒ | 40 | n.d. | 30 |
| | CᵣₛUᵣₛGᵣₛAᵣₛUᵣₛGsGᵣₛUᵣₛCᵣₛCᵣₛAᵣₛUᵣₛGᵣₛUᵣₛCᵣₛUᵣₛGₘₛUₘ | | | |
| 1038294 | CₘₛUᵣₛUᵣₒAᵣₒAᵣₒUᵣₒUᵣₒUᵣₒCᵣₒUᵣₒAᵣₒCᵣₒUᵣₒCᵣₒUᵣₒUᵣₒGᵣₒUᵣₒAᵣₒGᵣₒAᵣₒUᵣₒ | 40 | n.d. | 30 |
| | CᵣₒUᵣₒGᵣₒAᵣₒUᵣₒGᵣₛGᵣₛUᵣₛCᵣₛCᵣₛAᵣₛUᵣₛGᵣₛUᵣₛCᵣₛUᵣₛGₘₛUₘ | | | |
| 1038295 | CₘₛUₘₛUᵣₒAᵣₒAᵣₒUᵣₒUᵣₒUᵣₒCᵣₒUᵣₒAᵣₒCᵣₒUᵣₒCᵣₒUᵣₒUᵣₒGᵣₒUᵣₒAᵣₒGᵣₒAᵣₒUᵣₒ | 40 | n.d. | 30 |
| | CᵣₒUᵣₒGᵣₒAᵣₒUᵣₒGᵣₛGᵣₛUᵣₛCᵣₛCᵣₛAᵣₛUᵣₛGᵣₛUᵣₛCᵣₛUᵣₛGₘₛUₘ | | | |
| 1038296 | CₘₛUₘₛUᵣₒAᵣₒAᵣₒUᵣₒUᵣₒUᵣₒCᵣₒUᵣₒAᵣₒCᵣₒUᵣₒCᵣₒUᵣₒUᵣₒGᵣₒUᵣₒAᵣₒGᵣₒAᵣₒUᵣₒ | 40 | n.d. | 30 |
| | CᵣₛUᵣₛGᵣₛAᵣₛUᵣₛGᵣₛGᵣₛUᵣₛCᵣₛCᵣₛAᵣₛUᵣₛGᵣₛUᵣₛCᵣₛUᵣₛGₘₛUₘ | | | |
| 1038297 | CₘₛUᵣₛUᵣₒAᵣₒAᵣₒUᵣₒUᵣₒUᵣₒCᵣₒUᵣₒAᵣₒCᵣₒUᵣₒCᵣₒUᵣₒUᵣₒGᵣₒUᵣₒAᵣₒGᵣₒAᵣₒUᵣₒ | 40 | 80 | 30 |
| | CᵣₒUᵣₒGᵣₒAᵣₒUᵣₒGᵣₒGᵣₒUᵣₒCᵣₒCᵣₒAᵣₒUᵣₒGᵣₒUᵣₒCᵣₒUᵣₛGᵣₛU_{f} | | | |
| 1038298 | CₘₛUᵣₛUᵣₒAᵣₒAᵣₒUᵣₒUᵣₒUᵣₒCᵣₒUᵣₒAᵣₒCᵣₒUᵣₒCᵣₒUᵣₒUᵣₒGᵣₒUᵣₒAᵣₒGᵣₒAᵣₒUᵣₒ | 40 | 86 | 30 |
| | CᵣₒUᵣₒGᵣₒAᵣₒUᵣₒGᵣₒGᵣₒUᵣₒCᵣₒCᵣₒAᵣₒUᵣₒGᵣₒU_{fo}C_{fo}U_{fo}G_{fo}U_{f} | | | |
| 1038299 | CₘₛUᵣₛUᵣₒAᵣₒAᵣₒUᵣₒUᵣₒUᵣₒCᵣₒUᵣₒAᵣₒCᵣₒUᵣₒCᵣₒUᵣₒUᵣₒGᵣₒUᵣₒAᵣₒGᵣₒAᵣₒUᵣₒ | 40 | 100 | 30 |
| | CᵣₒUᵣₒGᵣₒAᵣₒUᵣₒGᵣₒGᵣₛUᵣₒCᵣₛCᵣₒAᵣₛUᵣₒGᵣₛU_{fo}C_{fs}U_{fo}G_{fs}U_{f} | | | |
| 1038300 | CₘₛUᵣₛUᵣₒAᵣₒAᵣₒUᵣₒU_{fo}UᵣₒCᵣₒUᵣₒAᵣₒCᵣₒUᵣₒCᵣₒUᵣₒUᵣₒGᵣₒUᵣₒAᵣₒGᵣₒAᵣₒUᵣₒ | 40 | 49 | 30 |
| | CᵣₒUᵣₒGᵣₒAᵣₒUᵣₒGᵣₒGᵣₒUᵣₒCᵣₒCᵣₒAᵣₒUᵣₒGᵣₒUᵣₒCᵣₒUᵣₛGₘₛUₘ | | | |
| 1038301 | CₘₛUᵣₛUᵣₒAᵣₒAᵣₒUᵣₒUᵣₒU_{fo}CᵣₒUᵣₒAᵣₒCᵣₒUᵣₒCᵣₒUᵣₒUᵣₒGᵣₒUᵣₒAᵣₒGᵣₒAᵣₒUᵣₒ | 40 | 44 | 30 |
| | CᵣₒUᵣₒGᵣₒAᵣₒUᵣₒGᵣₒGᵣₒUᵣₒCᵣₒCᵣₒAᵣₒUᵣₒGᵣₒUᵣₒCᵣₒUᵣₛGₘₛUₘ | | | |
| 1038302 | CₘₛUᵣₛUᵣₒAᵣₒAᵣₒUᵣₒUᵣₒUᵣₒC_{fo}UᵣₒAᵣₒCᵣₒUᵣₒCᵣₒUᵣₒUᵣₒGᵣₒUᵣₒAᵣₒGᵣₒAᵣₒUᵣₒ | 40 | 58 | 30 |
| | CᵣₒUᵣₒGᵣₒAᵣₒUᵣₒGᵣₒGᵣₒUᵣₒCᵣₒCᵣₒAᵣₒUᵣₒGᵣₒUᵣₒCᵣₒUᵣₛGₘₛUₘ | | | |
| 1038303 | CₘₛUᵣₛUᵣₒAᵣₒAᵣₒUᵣₒUᵣₒUᵣₒCᵣₒUᵣₒAᵣₒC_{fo}UᵣₒCᵣₒUᵣₒUᵣₒGᵣₒUᵣₒAᵣₒGᵣₒAᵣₒUᵣₒ | 40 | 52 | 30 |
| | CᵣₒUᵣₒGᵣₒAᵣₒUᵣₒGᵣₒGᵣₒUᵣₒCᵣₒCᵣₒAᵣₒUᵣₒGᵣₒUᵣₒCᵣₒUᵣₛGₘₛUₘ | | | |
| 1038304 | CₘₛUᵣₛUᵣₒAᵣₒAᵣₒUᵣₒUᵣₒUᵣₒCᵣₒUᵣₒAᵣₒCᵣₒUᵣₒCᵣₒUᵣₒU_{fo}GᵣₒUᵣₒAᵣₒGᵣₒAᵣₒUᵣₒ | 40 | 37 | 30 |
| | CᵣₒUᵣₒGᵣₒAᵣₒUᵣₒGᵣₒGᵣₒUᵣₒCᵣₒCᵣₒAᵣₒUᵣₒGᵣₒUᵣₒCᵣₒUᵣₛGₘₛUₘ | | | |
| 1038305 | CₘₛUᵣₛUᵣₒAᵣₒAᵣₒUᵣₒUᵣₒUᵣₒCᵣₒUᵣₒAᵣₒCᵣₒUᵣₒCᵣₒUᵣₒUᵣₒGᵣₒUᵣₒAᵣₒGᵣₒAᵣₒU_{fo} | 40 | n.d. | 30 |
| | CᵣₒUᵣₒGᵣₒAᵣₒUᵣₒGᵣₒGᵣₒUᵣₒCᵣₒCᵣₒAᵣₒUᵣₒGᵣₒUᵣₒCᵣₒUᵣₛGₘₛUₘ | | | |

A subscript “table” indicates a 2′-O-methyl modification. A subscript “r” indicates an unmodified, 2′-hydroxy sugar moiety. A subscript “f” indicates a 2′-F modification. A subscript “o” indicates a phosphate internucleoside linkage, and a subscript “s” indicates a phosphorothioate internucleoside linkage. The underlined portion of each crRNA is the target recognition portion, and the bolded nucleosides are linker nucleosides. The portion that is neither bold nor underlined is the CRISPR recognition portion of each crRNA. In the table above, the CRISPR recognition portions of the crRNAs recognize Cpf1. The modified crRNAs in the table above are 5′-stabilized, and the linker nucleosides comprise the 5′-stabilizing modifications.

### Example 5: Gene Editing Effects of Modified crRNAs

[0479] Modified crRNAs comprising a target recognition portion that is complementary to DNMT1 were designed and synthesized to test their effects on gene editing of DNMT1. HEK293T cells were transfected as described in Example 2, except the modified crRNAs are listed in the table below. Genomic DNA was isolated and analyzed as described in Example 1. The NHEJ incidence for each modified crRNA was normalized to the NHEJ incidence observed for crRNA 1034621, which was also tested in Examples 1-3. The normalized values are referred to as the gene disruption percentages. An entry of “n.d.” indicates no data due to the lack of detectable cleavage bands in the gel. The results, shown in the table below, indicate that multiple modified crRNAs edited the target gene, and, in many cases, were more efficacious than the unmodified crRNA 1034621. The results also indicated that certain positions that tolerate nucleobase changes in the target recognition portion (see, e.g., Kleinstiver et al. in Nature Biotechnology, 34, 869 (2016)), also tolerate modified sugars.

TABLE 5
crRNAs targeting DNMT1

| | | | (Normalized) | SEQ |
|---|---|---|---|---|
| | | | gene | ID |
| Name | Sequence (5′ to 3′) | Length | disruption (%) | NO. |
| 1034621 | AᵣₒUᵣₒUᵣₒUᵣₒCᵣₒUᵣₒAᵣₒCᵣₒUᵣₒCᵣₒUᵣₒUᵣₒGᵣₒUᵣₒAᵣₒGᵣₒAᵣₒUᵣₒCᵣₒUᵣₒGᵣₒAᵣₒ | 36 | 100 | 25 |
| | UᵣₒGᵣₒGᵣₒUᵣₒCᵣₒCᵣₒAᵣₒUᵣₒGᵣₒUᵣₒCᵣₒUᵣₒGᵣₒUᵣ | | | |
| 991458 | CₘₛUᵣₛUᵣₒAᵣₒAᵣₒUᵣₒUᵣₒUᵣₒCᵣₒUᵣₒAᵣₒCᵣₒUᵣₒCᵣₒUᵣₒUᵣₒGᵣₒUᵣₒAᵣₒGᵣₒAᵣₒUᵣₒ | 40 | 77 | 30 |
| | CᵣₒUᵣₒGᵣₒAᵣₒUᵣₒGᵣₒGᵣₒUᵣₒCᵣₒCᵣₒAᵣₒUᵣₒGᵣₒUᵣₒCᵣₒUᵣₛGₘₛUₘ | | | |
| 991461 | CₘₛUᵣₛUᵣₒAᵣₒAᵣₒUᵣₒUᵣₒUᵣₒCᵣₒUᵣₒAᵣₒCᵣₒUᵣₒCᵣₒUᵣₒUᵣₒGᵣₒUᵣₒAᵣₒGᵣₒAᵣₒUᵣₒ | 40 | 124 | 31 |
| | CᵣₒUᵣₒGᵣₒAᵣₒUᵣₒGᵣₒGᵣₒUᵣₒCᵣₒCᵣₒAᵣₒUᵣₒGᵣₒUᵣₒCᵣₒUᵣₛGᵣₛTₖ | | | |
| 991462 | CₘₛUᵣₛUᵣₒAᵣₒAᵣₒUᵣₒUᵣₒUᵣₒCᵣₒUᵣₒAᵣₒCᵣₒUᵣₒCᵣₒUᵣₒUᵣₒGᵣₒUᵣₒAᵣₒGᵣₒAᵣₒUᵣₒ | 40 | 168 | 31 |
| | CᵣₒUᵣₒGᵣₒAᵣₒUᵣₒGᵣₒGᵣₒUᵣₒCᵣₒCᵣₒAᵣₒUᵣₒGᵣₒUᵣₒCᵣₒUᵣₛTₖ | | | |
| 991775 | ^{m}CₖₛUᵣₛUᵣₒAᵣₒAᵣₒUᵣₒUᵣₒUᵣₒCᵣₒUᵣₒAᵣₒCᵣₒUᵣₒCᵣₒUᵣₒUᵣₒGᵣₒUᵣₒAᵣₒGᵣₒAᵣₒUᵣₒ | 40 | 147 | 30 |
| | CᵣₒUᵣₒGᵣₒAᵣₒUᵣₒGᵣₒGᵣₒUᵣₒCᵣₒCᵣₒAᵣₒUᵣₒGᵣₒUᵣₒCᵣₒUᵣₛGᵣₛUₘ | | | |
| 991776 | ^{m}CₖₛUᵣₛUᵣₒAᵣₒAᵣₒUᵣₒUᵣₒUᵣₒCᵣₒUᵣₒAᵣₒCᵣₒUᵣₒCᵣₒUᵣₒUᵣₒGᵣₒUᵣₒAᵣₒGᵣₒAᵣₒUᵣₒ | 40 | 159 | 31 |
| | CᵣₒUᵣₒGᵣₒAᵣₒUᵣₒGᵣₒGᵣₒUᵣₒCᵣₒCᵣₒAᵣₒUᵣₒGᵣₒUᵣₒCᵣₒUᵣₛGₖₛTₖ | | | |
| 991777 | CₘₛUᵣₛUᵣₒAᵣₒAᵣₒUᵣₒUᵣₒUᵣₒCᵣₒUᵣₒAᵣₒCᵣₒUᵣₒCᵣₒUᵣₒUᵣₒGᵣₒUᵣₒAᵣₒGᵣₒAᵣₒUᵣₒ | 40 | 138 | 31 |
| | CᵣₒUᵣₒGᵣₒAᵣₒUᵣₒGᵣₒG_{fo}U_{fo}C_{fo}C_{fo}A_{fo}U_{fo}G_{fo}U_{fo}C_{fo}U_{fs}GₖₛTₖ | | | |
| 991783 | ^{m}CₖₛUᵣₛUᵣₒAᵣₒAᵣₒUᵣₒUᵣₒUᵣₒCᵣₒUᵣₒAᵣₒCᵣₒUᵣₒCᵣₒUᵣₒUᵣₒGᵣₒUᵣₒAᵣₒGᵣₒAᵣₒUᵣₒ | 40 | 176 | 30 |
| | CᵣₒUᵣₒGᵣₒAᵣₒUᵣₒGᵣₒGᵣₒUᵣₒ^{m}CₖₒCᵣₒAᵣₒUᵣₒGᵣₒUᵣₒCᵣₒUᵣₛGₘₛUₘ | | | |
| 991784 | ^{m}CₖₛUᵣₛUᵣₒAᵣₒAᵣₒUᵣₒUᵣₒUᵣₒCᵣₒUᵣₒAᵣₒCᵣₒUᵣₒCᵣₒUᵣₒUᵣₒGᵣₒUᵣₒAᵣₒGᵣₒAᵣₒUᵣₒ | 40 | n.d. | 32 |
| | ^{m}CₖₒUᵣₒGᵣₒAᵣₒUᵣₒGᵣₒGᵣₒTₖₒ^{m}CₖₒCᵣₒAᵣₒUᵣₒGᵣₒUᵣₒCᵣₒUᵣₛGₘₛUₘ | | | |

A subscript “m” indicates a 2′-O-methyl modification. A superscript “m” adjacent to a “C” indicates a 5-methyl cytosine. A subscript “r” indicates an unmodified, 2′-hydroxy sugar moiety. A subscript “f” indicates a 2′-F modification. A subscript “k” indicates a cEt modification. A subscript “o” indicates a phosphate internucleoside linkage, and a subscript “s” indicates a phosphorothioate internucleoside linkage. The underlined portion of each crRNA is the target recognition portion, and the bolded nucleosides are linker nucleosides. The portion that is neither bold nor underlined is the CRISPR recognition portion of each crRNA. In the table above, the CRISPR recognition portions of the crRNAs recognize Cpf1. Other than crRNA 1034621, the modified crRNAs in the table above are 5′-stabilized, and the linker nucleosides comprise the 5′-stabilizing modifications.

### Example 6: Gene Editing Effects of Modified crRNAs

[0480] Modified crRNAs comprising a target recognition portion that is complementary to DNMT1 were designed and synthesized to test their effects on gene editing of DNMT1. HEK293T cells were transfected as described in Example 2, except the modified crRNAs are listed in the table below. Genomic DNA was isolated and analyzed as described in Example 1. The NHEJ incidence for each modified crRNA was normalized to the NHEJ incidence observed for crRNA 989549. The normalized values are referred to as the gene disruption percentages. The results, shown in the table below, indicate that modified crRNAs edited the target gene.

TABLE 6
crRNAs targeting DNMT1

| | | | (Normalized) | SEQ |
|---|---|---|---|---|
| | | | gene | ID |
| Name | Sequence (5′ to 3′) | Length | disruption (%) | NO. |
| 989549 | CᵣₒUᵣₒUᵣₒAᵣₒAᵣₒUᵣₒUᵣₒUᵣₒCᵣₒUᵣₒAᵣₒCᵣₒUᵣₒCᵣₒUᵣₒUᵣₒGᵣₒUᵣₒAᵣₒGᵣₒAᵣₒUᵣₒ | 40 | 100 | 30 |
| | CᵣₒUᵣₒGᵣₒAᵣₒUᵣₒGᵣₒGᵣₒUᵣₒCᵣₒCᵣₒAᵣₒUᵣₒGᵣₒUᵣₒCᵣₒUᵣₒGᵣₒUᵣ | | | |
| 1038293 | CₘₛUᵣₛUᵣₒAᵣₒAᵣₒUᵣₒUᵣₒUᵣₒCᵣₒUᵣₒAᵣₒCᵣₒUᵣₒCᵣₒUᵣₒUᵣₒGᵣₒUᵣₒAᵣₒGᵣₒAᵣₒUᵣₒ | 40 | 26 | 30 |
| | CᵣₛUᵣₛGᵣₛAᵣₛUᵣₛGᵣₛGᵣₛUᵣₛCᵣₛCᵣₛAᵣₛUᵣₛGᵣₛUᵣₛCᵣₛUᵣₛGₘₛUₘ | | | |
| 1038294 | CₘₛUᵣₛUᵣₒAᵣₒAᵣₒUᵣₒUᵣₒUᵣₒCᵣₒUᵣₒAᵣₒCᵣₒUᵣₒCᵣₒUᵣₒUᵣₒGᵣₒUᵣₒAᵣₒGᵣₒAᵣₒUᵣₒ | 40 | 38 | 30 |
| | CᵣₒUᵣₒGᵣₒAᵣₒUᵣₒGᵣₛGᵣₛUᵣₛCᵣₛCᵣₛAᵣₛUᵣₛGᵣₛUᵣₛCᵣₛUᵣₛGₘₛUₘ | | | |
| 1086669 | CᵣₛUᵣₛUᵣₛAᵣₛAᵣₛUᵣₛUᵣₛUᵣₛCᵣₛUᵣₛAᵣₛCᵣₛUᵣₛCᵣₛUᵣₛUᵣₛGᵣₛUᵣₛAᵣₛGᵣₛAᵣₛUᵣₛCᵣₛ | 40 | 26 | 30 |
| | UᵣₛGᵣₛAᵣₛUᵣₛGᵣₛGᵣₛUᵣₛCᵣₛCᵣₛAᵣₛUᵣₛGᵣₛUᵣₛCᵣₛUᵣₛGᵣₛUᵣ | | | |
| 1086670 | CₘₛUᵣₛUᵣₛAᵣₛAᵣₛUᵣₛUᵣₛUᵣₛCᵣₛUᵣₛAᵣₛCᵣₛUᵣₛCᵣₛUᵣₛUᵣₛGᵣₛUᵣₛAᵣₛGᵣₛAᵣₛUᵣₒCᵣₒ | 40 | 68 | 30 |
| | UᵣₒGᵣₒAᵣₒUᵣₒGᵣₒGᵣₒUᵣₒCᵣₒCᵣₒAᵣₒUᵣₒGᵣₒUᵣₒCᵣₒUᵣₛGₘₛUₘ | | | |
| 1086671 | CₘₛUᵣₛUᵣₒAᵣₒAᵣₒUᵣₒUᵣₒUᵣₒCᵣₒUᵣₒAᵣₒCᵣₒUᵣₒCᵣₒUᵣₒUᵣₒGᵣₒUᵣₒAᵣₒGᵣₒAᵣₒUᵣₒ | 40 | 77 | 30 |
| | CᵣₒUᵣₒGᵣₒAᵣₒUᵣₒGᵣₒGᵣₛUᵣₒCᵣₛCᵣₒAᵣₛUᵣₒGᵣₛUᵣₒCᵣₛUᵣₒGₘₛUₘ | | | |

A subscript “m” indicates a 2′-O-methyl modification. A subscript “r” indicates an unmodified, 2′-hydroxy sugar moiety. A subscript “o” indicates a phosphate internucleoside linkage, and a subscript “s” indicates a phosphorothioate internucleoside linkage. The underlined portion of each crRNA is the target recognition portion, and the bolded nucleosides are linker nucleosides. The portion that is neither bold nor underlined is the CRISPR recognition portion of each crRNA. In the table above, the CRISPR recognition portions of the crRNAs recognize Cpf1. The modified crRNAs in the table above are 5′-stabilized, and the linker nucleosides comprise the 5′-stabilizing modifications.

### Example 7: Gene Editing Effects of Modified crRNAs

[0481] Modified crRNAs described below and in Examples 4, 5, and 6 were tested for their effects on gene editing of DNMT1 relative to crRNA 989549. HEK293T cells were transfected as described in Example 2, with 3 μL of 100 μM of a crRNA listed in the table below. Genomic DNA was isolated and analyzed as described in Example 1. The NHEJ incidence for each modified crRNA was normalized to the NHEJ incidence observed for crRNA 989549. The normalized values are referred to as the gene disruption percentages. The results, shown in the table below, indicate that multiple modified crRNAs edited the target gene.

TABLE 7
crRNAs targeting DNMT1

| Name | Sequence (5′ to 3′) | Length | SEQ ID No. |
|---|---|---|---|
| 1120133 | CₘₛUᵣₛUᵣₒAᵣₒAᵣₒUᵣₒUᵣₒUᵣₒCᵣₒUᵣₒAᵣₒCᵣₒUᵣₒCᵣₒUᵣₒUᵣₒGᵣₒUᵣₒAᵣₒGᵣₒAᵣₒUᵣₒCᵣₒUᵣₒ | 40 | 30 |
| | GᵣₒAᵣₒUᵣₒGᵣₒGᵣₒUᵣₒCᵣₒCᵣₒAᵣₒUᵣₒGᵣₒU_{fo}C_{fo}U_{fs}GₘₛUₘ | | |
| 1120139 | CₘₛUᵣₛUᵣₒAᵣₒAᵣₒUᵣₒUᵣₒUᵣₒCᵣₒUᵣₒAᵣₒCᵣₒUᵣₒCᵣₒUᵣₒUᵣₒGᵣₒUᵣₒAᵣₒGᵣₒAᵣₒUᵣₒCᵣₒUᵣₒ | 40 | 30 |
| | GᵣₒAᵣₒUᵣₒGᵣₒGᵣₛUᵣₒCᵣₛCᵣₒAᵣₛUᵣₒGᵣₛU_{fo}C_{fs}U_{fs}GₘₛUₘ | | |
| 1120140 | CₘₛUᵣₛUᵣₒAᵣₒAᵣₒUᵣₒUᵣₒUᵣₒCᵣₒUᵣₒAᵣₒCᵣₒUᵣₒCᵣₒUᵣₒUᵣₒGᵣₒUᵣₒAᵣₒGᵣₒAᵣₒUᵣₒCₘₒUᵣₒ | 40 | 30 |
| | GᵣₒAᵣₒUᵣₒGᵣₒGᵣₛUₘₒCₘₛCᵣₒAᵣₛUᵣₒGᵣₛU_{fo}C_{fs}U_{fs}GₘₛUₘ | | |
| 1120141 | CₘₛUᵣₛUᵣₒAᵣₒAᵣₒUᵣₒUᵣₒUᵣₒCᵣₒUᵣₒAᵣₒCᵣₒUᵣₒCᵣₒUᵣₒUᵣₒGᵣₒUᵣₒAᵣₒGᵣₒAᵣₒUᵣₒC_{fo}Uᵣₒ | 40 | 30 |
| | GᵣₒAᵣₒUᵣₒGᵣₒGᵣₛU_{fo}C_{fs}CᵣₒAᵣₛUᵣₒGᵣₛU_{fo}C_{fs}U_{fs}GₘₛUₘ | | |

A subscript “m” indicates a 2-O-methyl modification. A subscript “r” indicates an unmodified, 2-hydroxy sugar moiety. A subscript “o” indicates a phosphate internucleoside linkage, and a subscript “s” indicates a phosphorothioate internucleoside linkage. A subscript “f” indicates a 2′-F modification. The underlined portion of each crRNA is the target recognition portion, and the bolded nucleosides are linker nucleosides. The portion that is neither bold nor underlined is the CRISPR recognition portion of each crRNA. In the table above, the CRISPR recognition portions of the crRNAs recognize Cpf1. The modified crRNAs in the table above are 5′-stabilized, and the linker nucleosides comprise the 5′-stabilizing modifications.

TABLE 8a
Gene disruption

| | (Normalized) gene |
|---|---|
| Name | disruption (%) |
| 989549 | 100 |
| 1038297 | 110 |
| 1038298 | 160 |
| 1038299 | 140 |
| 1120133 | 60 |
| 1120139 | 50 |
| 991461 | 90 |
| 991462 | 90 |
| 991777 | 80 |
| 991775 | 80 |
| 991776 | 90 |
| 991783 | 130 |
| 991784 | 10 |

TABLE 8b
Gene disruption

| | (Normalized) gene |
|---|---|
| Name | disruption (%) |
| 989549 | 100 |
| 1120140 | 10 |
| 1120141 | 70 |

### Example 8: Gene Editing Effects of Modified crRNAs

[0482] Modified crRNAs comprising a target recognition portion that is complementary to DNMT1 were designed and synthesized to test their effects on gene editing of DNMT1. HEK293T cells were transfected as described in Example 2, with 3 μL of 100 μM of a crRNA listed in the table below. Genomic DNA was isolated and analyzed as described in Example 1. The NHEJ incidence for each modified crRNA in Table 9 was normalized to the NHEJ incidence observed for modified crRNA 1090626. The normalized values are referred to as the gene disruption percentages. The NHEJ incidence for each modified crRNA in Table 10 was not normalized, the absolute percentages of gene disruption observed are listed. The results, shown in the tables below, indicate that multiple modified crRNAs edited the target gene.

TABLE 9
crRNAs targeting DNMT1

| | | | Norm. gene | SEQ |
|---|---|---|---|---|
| | | | disruption | ID |
| Name | Sequence (5′ to 3′) | Length | (%) | NO. |
| 1038306 | UᵣₒAᵣₒAᵣₒUᵣₒUᵣₒUᵣₒCᵣₒUᵣₒAᵣₒCᵣₒUᵣₒCᵣₒUᵣₒUᵣₒGᵣₒUᵣₒAᵣₒGᵣₒAᵣₒUᵣₒCᵣₒUᵣₒGᵣₒ | 43 | 120 | 33 |
| | AᵣₒUᵣₒGᵣₒGᵣₒUᵣₒCᵣₒCᵣₒAᵣₒUᵣₒGᵣₒUᵣₒCᵣₒUᵣₒGᵣₒUᵣₒT_{do}A_{do}C_{do}T_{do}C_{d} | | | |
| 1038307 | UᵣₒAᵣₒAᵣₒUᵣₒUᵣₒUᵣₒCᵣₒUᵣₒAᵣₒCᵣₒUᵣₒCᵣₒUᵣₒUᵣₒGᵣₒUᵣₒAᵣₒGᵣₒAᵣₒUᵣₒC_{do}UᵣₒGᵣₒ | 43 | 143 | 33 |
| | AᵣₒUᵣₒGᵣₒGᵣₒUᵣₒCᵣₒCᵣₒAᵣₒUᵣₒGᵣₒUᵣₒCᵣₒUᵣₒGᵣₒUᵣₒT_{do}A_{do}C_{do}T_{do}C_{d} | | | |
| 1038308 | UᵣₒAᵣₒAᵣₒUᵣₒUᵣₒUᵣₒCᵣₒUᵣₒAᵣₒCᵣₒUᵣₒCᵣₒUᵣₒUᵣₒGᵣₒUᵣₒAᵣₒGᵣₒAᵣₒUᵣₒCᵣₒUᵣₒGᵣₒ | 43 | 135 | 34 |
| | AᵣₒUᵣₒGᵣₒGᵣₒT_{do}CᵣₒCᵣₒAᵣₒUᵣₒGᵣₒUᵣₒCᵣₒUᵣₒGᵣₒUᵣₒT_{do}A_{do}C_{do}T_{do}C_{d} | | | |
| 1038309 | UᵣₒAᵣₒAᵣₒUᵣₒUᵣₒUᵣₒCᵣₒUᵣₒAᵣₒCᵣₒUᵣₒCᵣₒUᵣₒUᵣₒGᵣₒUᵣₒAᵣₒGᵣₒAᵣₒUᵣₒCᵣₒUᵣₒGᵣₒ | 43 | 169 | 33 |
| | AᵣₒUᵣₒGᵣₒGᵣₒUᵣₒC_{do}CᵣₒAᵣₒUᵣₒGᵣₒUᵣₒCᵣₒUᵣₒGᵣₒUᵣₒT_{do}A_{do}C_{do}T_{do}C_{d} | | | |
| 1038335 | UᵣₒAᵣₒAᵣₒUᵣₒUᵣₒUᵣₒCᵣₒUᵣₒAᵣₒCᵣₒUᵣₒCᵣₒUᵣₒUᵣₒGᵣₒUᵣₒAᵣₒGᵣₒAᵣₒUᵣₒC_{do}UᵣₒGᵣₒ | 43 | 198 | 34 |
| | AᵣₒUᵣₒGᵣₒGᵣₒT_{do}CᵣₒCᵣₒAᵣₒUᵣₒGᵣₒUᵣₒCᵣₒUᵣₒGᵣₒUᵣₒT_{do}A_{do}C_{do}T_{do}C_{d} | | | |
| 1038310 | UᵣₒAᵣₒAᵣₒUᵣₒUᵣₒUᵣₒCᵣₒUᵣₒAᵣₒCᵣₒUᵣₒCᵣₒUᵣₒUᵣₒGᵣₒUᵣₒAᵣₒGᵣₒAᵣₒUᵣₒC_{do}UᵣₒGᵣₒ | 43 | 181 | 33 |
| | AᵣₒUᵣₒGᵣₒGᵣₒUᵣₒC_{do}CᵣₒAᵣₒUᵣₒGᵣₒUᵣₒCᵣₒUᵣₒGᵣₒUᵣₒT_{do}A_{do}C_{do}T_{do}C_{d} | | | |
| 1038311 | UᵣₒAᵣₒAᵣₒUᵣₒUᵣₒUᵣₒCᵣₒUᵣₒAᵣₒCᵣₒUᵣₒCᵣₒUᵣₒUᵣₒGᵣₒUᵣₒAᵣₒGᵣₒAᵣₒUᵣₒCᵣₒUᵣₒGᵣₒ | 43 | 181 | 34 |
| | AᵣₒUᵣₒGᵣₒGᵣₒT_{do}C_{do}CᵣₒAᵣₒUᵣₒGᵣₒUᵣₒCᵣₒUᵣₒGᵣₒUᵣₒT_{do}A_{do}C_{do}T_{do}C_{d} | | | |
| 1038312 | UᵣₒAᵣₒAᵣₒUᵣₒUᵣₒUᵣₒCᵣₒUᵣₒAᵣₒCᵣₒUᵣₒCᵣₒUᵣₒUᵣₒGᵣₒUᵣₒAᵣₒGᵣₒAᵣₒUᵣₒC_{do}UᵣₒGᵣₒ | 43 | 184 | 34 |
| | AᵣₒUᵣₒGᵣₒGᵣₒT_{do}C_{do}CᵣₒAᵣₒUᵣₒGᵣₒUᵣₒCᵣₒUᵣₒGᵣₒUᵣₒT_{do}A_{do}C_{do}T_{do}C_{d} | | | |
| 1090623 | UᵣₒAᵣₒAᵣₒUᵣₒUᵣₒUᵣₒCᵣₒUᵣₒAᵣₒCᵣₒUᵣₒCᵣₒUᵣₒUᵣₒGᵣₒUᵣₒAᵣₒGᵣₒAᵣₒUᵣₒC_{do}UᵣₒGᵣₒ | 42 | 105 | 35 |
| | AᵣₒUᵣₒGᵣₒGᵣₒT_{do}C_{do}CᵣₒAᵣₒUᵣₒGᵣₒUᵣₒCᵣₒUᵣₒGᵣₒUᵣₒT_{do}A_{do}C_{do}T_{d} | | | |
| 1090624 | UᵣₒAᵣₒAᵣₒUᵣₒUᵣₒUᵣₒCᵣₒUᵣₒAᵣₒCᵣₒUᵣₒCᵣₒUᵣₒUᵣₒGᵣₒUᵣₒAᵣₒGᵣₒAᵣₒUᵣₒC_{do}UᵣₒGᵣₒ | 41 | 120 | 36 |
| | AᵣₒUᵣₒGᵣₒGᵣₒT_{do}C_{do}CᵣₒAᵣₒUᵣₒGᵣₒUᵣₒCᵣₒUᵣₒGᵣₒUᵣₒT_{do}A_{do}C_{d} | | | |
| 1090625 | UᵣₒAᵣₒAᵣₒUᵣₒUᵣₒUᵣₒCᵣₒUᵣₒAᵣₒCᵣₒUᵣₒCᵣₒUᵣₒUᵣₒGᵣₒUᵣₒAᵣₒGᵣₒAᵣₒUᵣₒC_{do}UᵣₒGᵣₒ | 40 | 105 | 37 |
| | AᵣₒUᵣₒGᵣₒGᵣₒT_{do}C_{do}CᵣₒAᵣₒUᵣₒGᵣₒUᵣₒCᵣₒUᵣₒGᵣₒUᵣₒT_{do}A_{d} | | | |
| 1090626 | UᵣₒAᵣₒAᵣₒUᵣₒUᵣₒUᵣₒCᵣₒUᵣₒAᵣₒCᵣₒUᵣₒCᵣₒUᵣₒUᵣₒGᵣₒUᵣₒAᵣₒGᵣₒAᵣₒUᵣₒC_{do}UᵣₒGᵣₒ | 39 | 100 | 38 |
| | AᵣₒUᵣₒGᵣₒGᵣₒT_{do}C_{do}CᵣₒAᵣₒUᵣₒGᵣₒUᵣₒCᵣₒUᵣₒGᵣₒUᵣₒT_{d} | | | |
| 1090627 | UᵣₒAᵣₒAᵣₒUᵣₒUᵣₒUᵣₒCᵣₒUᵣₒAᵣₒCᵣₒUᵣₒCᵣₒUᵣₒUᵣₒGᵣₒUᵣₒAᵣₒGᵣₒAᵣₒUᵣₒC_{do}UᵣₒGᵣₒ | 38 | 11 | 39 |
| | AᵣₒUᵣₒGᵣₒGᵣₒT_{do}C_{do}CᵣₒAᵣₒUᵣₒGᵣₒUᵣₒCᵣₒUᵣₒGᵣₒT_{d} | | | |
| 1038313 | C_{do}T_{do}UᵣₒAᵣₒAᵣₒUᵣₒUᵣₒUᵣₒCᵣₒUᵣₒAᵣₒCᵣₒUᵣₒCᵣₒUᵣₒUᵣₒGᵣₒUᵣₒAᵣₒGᵣₒAᵣₒUᵣₒCᵣₒ | 45 | 161 | 40 |
| | UᵣₒGᵣₒAᵣₒUᵣₒGᵣₒGᵣₒUᵣₒCᵣₒCᵣₒAᵣₒUᵣₒGᵣₒUᵣₒCᵣₒUᵣₒGᵣₒUᵣₒT_{do}A_{do}C_{do}T_{do}C_{d} | | | |

TABLE 10
crRNAs targeting DNMT1

| | | | Abs. Gene | SEQ |
|---|---|---|---|---|
| | | | disruption | ID |
| Name | Sequence (5′ to 3′) | Length | (%) | NO. |
| 1038313 | C_{do}T_{do}UᵣₒAᵣₒAᵣₒUᵣₒUᵣₒUᵣₒCᵣₒUᵣₒAᵣₒCᵣₒUᵣₒCᵣₒUᵣₒUᵣₒGᵣₒUᵣₒAᵣₒGᵣₒAᵣₒUᵣₒCᵣₒ | 45 | 21 | 40 |
| | UᵣₒGᵣₒAᵣₒUᵣₒGᵣₒGᵣₒUᵣₒCᵣₒCᵣₒAᵣₒUᵣₒGᵣₒUᵣₒCᵣₒUᵣₒGᵣₒUᵣₒT_{do}A_{do}C_{do}T_{do}C_{d} | | | |
| 1090628 | UᵣₒAᵣₒAᵣₒUᵣₒUᵣₒUᵣₒCᵣₒUᵣₒAᵣₒCᵣₒUᵣₒCᵣₒUᵣₒUᵣₒGᵣₒUᵣₒAᵣₒGᵣₒAᵣₒUᵣₒCᵣₒUᵣₒGᵣₒ | 43 | n.d. | 41 |
| | AᵣₒGᵣₒGᵣₒUᵣₒCᵣₒCᵣₒAᵣₒUᵣₒGᵣₒUᵣₒCᵣₒT_{do}G_{do}T_{do}T_{do}A_{do}C_{do}T_{do}C_{d} | | | |
| 1090629 | UᵣₒAᵣₒAᵣₒUᵣₒUᵣₒUᵣₒCᵣₒUᵣₒAᵣₒCᵣₒUᵣₒCᵣₒUᵣₒUᵣₒGᵣₒUᵣₒAᵣₒGᵣₒAᵣₒUᵣₒCᵣₒUᵣₒGᵣₒ | 43 | n.d. | 42 |
| | AᵣₒUᵣₒGᵣₒGᵣₒUᵣₒCᵣₒC_{do}A_{do}T_{do}G_{do}T_{do}C_{do}T_{do}G_{do}T_{do}T_{do}A_{do}C_{do}T_{do}C_{d} | | | |
| 1090630 | UᵣₒAᵣₒAᵣₒUᵣₒUᵣₒUᵣₒCᵣₒUᵣₒAᵣₒCᵣₒUᵣₒCᵣₒUᵣₒUᵣₒGᵣₒUᵣₒAᵣₒGᵣₒAᵣₒUᵣₒCᵣₒUᵣₒGᵣₒ | 43 | n.d. | 43 |
| | AᵣₒUᵣₒGᵣₒG_{do}T_{do}C_{do}C_{do}A_{do}T_{do}G_{do}T_{do}C_{do}T_{do}G_{do}T_{do}T_{do}A_{do}C_{do}T_{do}C_{d} | | | |
| 1090631 | UᵣₒAᵣₒAᵣₒUᵣₒUᵣₒUᵣₒCᵣₒUᵣₒAᵣₒCᵣₒUᵣₒCᵣₒUᵣₒUᵣₒGᵣₒUᵣₒAᵣₒGᵣₒAᵣₒUᵣₒCᵣₒUᵣₒGᵣₒ | 43 | n.d. | 43 |
| | AᵣₒUᵣₒG_{do}G_{do}T_{do}C_{do}C_{do}A_{do}T_{do}G_{do}T_{do}C_{do}T_{do}G_{do}T_{do}T_{do}A_{do}C_{do}T_{do}C_{d} | | | |
| 1090632 | UᵣₒAᵣₒAᵣₒUᵣₒUᵣₒUᵣₒCᵣₒUᵣₒAᵣₒCᵣₒUᵣₒCᵣₒUᵣₒUᵣₒGᵣₒUᵣₒAᵣₒGᵣₒAᵣₒUᵣₒC_{do}T_{do}G_{do} | 43 | n.d. | 44 |
| | A_{do}T_{do}G_{do}G_{do}T_{do}C_{do}C_{do}A_{do}T_{do}G_{do}T_{do}C_{do}T_{do}G_{do}T_{do}T_{do}A_{do}C_{do}T_{do}C_{d} | | | |
| 1090633 | T_{do}A_{do}A_{do}T_{do}T_{do}T_{do}^{m}C_{do}T_{do}A_{do}^{m}C_{do}T_{do}^{m}C_{do}T_{do}T_{do}G_{do}T_{do}A_{do}G_{do}A_{do}T_{do}^{m}C_{do} | 43 | n.d. | 45 |
| | T_{do}G_{do}A_{do}T_{do}G_{do}G_{do}T_{do}^{m}C_{do}^{m}C_{do}A_{do}T_{do}G_{do}T_{do}^{m}C_{do}T_{do}G_{do}T_{do}T_{do}A_{do}^{m}C_{do} | | | |
| | T_{do}^{m}C_{d} | | | |

In the tables above, a subscript “r” indicates an unmodified, 2′-hydroxy sugar moiety. A subscript “d” indicates a modified, 2′-deoxy sugar moiety. A subscript “o” indicates a phosphate internucleoside linkage. A “C” following a superscript “m” indicates a 5-methyl cytosine. The underlined portion of each crRNA is the target recognition portion, and the bolded nucleosides are linker nucleosides. The portion that is neither bold nor underlined is the CRISPR recognition portion of each crRNA. The CRISPR recognition portions of the crRNAs recognize Cpf1.

### Example 9: Gene Editing Effects of Modified crRNAs

[0483] Modified crRNAs comprising a target recognition portion that is complementary to Low Density Lipoprotein Receptor (LDLR) were designed and synthesized to test their effects on gene editing of LDLR. HEK293T cells were transfected as described in Example 2, with 3 μL of 100 μM of a crRNA listed in the table below. Genomic DNA was isolated and analyzed as described in Example 1 except that the PCR primers used to amplify the crRNA target site in the LDLR gene were forward: 5′-GGAGACCCAAATACAACAAATC-3′ (SEQ ID NO: 56) and reverse: 5′-CTAGACTCCGTCTCAAAGAAG-3′ (SEQ ID NO: 57). The NHEJ incidence for each modified crRNA was normalized to the NHEJ incidence observed for crRNA 1091152. The normalized values are referred to as the gene disruption percentages. The results, shown in the table below, indicate that modified crRNAs edited the target gene.

TABLE 11a
crRNAs targeting LDLR

| | | | Norm. gene | SEQ |
|---|---|---|---|---|
| | | | disruption | ID |
| Name | Sequence (5′ to 3′) | Length | (%) | NO. |
| 1091152 | CᵣₒUᵣₒUᵣₒAᵣₒAᵣₒUᵣₒUᵣₒUᵣₒCᵣₒUᵣₒAᵣₒCᵣₒUᵣₒCᵣₒUᵣₒUᵣₒGᵣₒUᵣₒAᵣₒGᵣₒAᵣₒUᵣₒCᵣₒ | 40 | 100 | 46 |
| | AᵣₒGᵣₒCᵣₒUᵣₒAᵣₒGᵣₒGᵣₒAᵣₒCᵣₒAᵣₒCᵣₒAᵣₒGᵣₒCᵣₒAᵣₒGᵣₒGᵣ | | | |
| 1091153 | CₘₛUᵣₒUᵣₒAᵣₒAᵣₒUᵣₒUᵣₒUᵣₒCᵣₒUᵣₒAᵣₒCᵣₒUᵣₒCᵣₒUᵣₒUᵣₒGᵣₒUᵣₒAᵣₒGᵣₒAᵣₒUᵣₒC_{do} | 40 | n.d. | 46 |
| | AᵣₒGᵣₒCᵣₒUᵣₒAᵣₒGᵣₒG_{do}A_{do}CᵣₒAᵣₒCᵣₒAᵣₒGᵣₒCᵣₒAᵣₒGₘₛGₘ | | | |
| 1091154 | UᵣₒAᵣₒAᵣₒUᵣₒUᵣₒUᵣₒCᵣₒUᵣₒAᵣₒCᵣₒUᵣₒCᵣₒUᵣₒUᵣₒGᵣₒUᵣₒAᵣₒGᵣₒAᵣₒUᵣₒC_{do}AᵣₒGᵣₒ | 43 | 120 | 47 |
| | CᵣₒUᵣₒAᵣₒGᵣₒGᵣₒAᵣₒCᵣₒAᵣₒCᵣₒAᵣₒGᵣₒCᵣₒAᵣₒGᵣₒGᵣₒT_{do}C_{do}G_{do}T_{do}G_{d} | | | |
| 1091155 | UᵣₒAᵣₒAᵣₒUᵣₒUᵣₒUᵣₒCᵣₒUᵣₒAᵣₒCᵣₒUᵣₒCᵣₒUᵣₒUᵣₒGᵣₒUᵣₒAᵣₒGᵣₒAᵣₒUᵣₒC_{do}AᵣₒGᵣₒ | 43 | 100 | 47 |
| | CᵣₒUᵣₒAᵣₒGᵣₒG_{do}A_{do}CᵣₒAᵣₒCᵣₒAᵣₒGᵣₒCᵣₒAᵣₒGᵣₒGᵣₒT_{do}C_{do}G_{do}T_{do}G_{d} | | | |
| 1091156 | UₘₛAᵣₒAᵣₒUᵣₒUᵣₒUᵣₒCᵣₒUᵣₒAᵣₒCᵣₒUᵣₒCᵣₒUᵣₒUᵣₒGᵣₒUᵣₒAᵣₒGᵣₒAᵣₒUᵣₒC_{do}AᵣₒGᵣₒ | 43 | 120 | 48 |
| | CᵣₒUᵣₒAᵣₒGᵣₒGᵣₒAᵣₒCᵣₒAᵣₒCᵣₒAᵣₒGᵣₒCᵣₒAᵣₒGᵣₒGᵣₒUᵣₒCᵣₒGᵣₒUₘₛGₘ | | | |
| 1091157 | UₘₛAᵣₒAᵣₒUᵣₒUᵣₒUᵣₒCᵣₒUᵣₒAᵣₒCᵣₒUᵣₒCᵣₒUᵣₒUᵣₒGᵣₒUᵣₒAᵣₒGᵣₒAᵣₒUᵣₒC_{do}AᵣₒGᵣₒ | 43 | 110 | 48 |
| | CᵣₒUᵣₒAᵣₒGᵣₒG_{do}A_{do}CᵣₒAᵣₒCᵣₒAᵣₒGᵣₒCᵣₒAᵣₒGᵣₒGᵣₒUᵣₒCᵣₒGᵣₒUₘₛGₘ | | | |
| 1091158 | C_{do}T_{do}UᵣₒAᵣₒAᵣₒUᵣₒUᵣₒUᵣₒCᵣₒUᵣₒAᵣₒCᵣₒUᵣₒCᵣₒUᵣₒUᵣₒGᵣₒUᵣₒAᵣₒGᵣₒAᵣₒUᵣₒC_{do} | 45 | 120 | 49 |
| | AᵣₒGᵣₒCᵣₒUᵣₒAᵣₒGᵣₒGᵣₒAᵣₒCᵣₒAᵣₒCᵣₒAᵣₒGᵣₒCᵣₒAᵣₒGᵣₒGᵣₒT_{do}C_{do}G_{do}T_{do}G_{d} | | | |
| 1091159 | C_{do}T_{do}UᵣₒAᵣₒAᵣₒUᵣₒUᵣₒUᵣₒCᵣₒUᵣₒAᵣₒCᵣₒUᵣₒCᵣₒUᵣₒUᵣₒGᵣₒUᵣₒAᵣₒGᵣₒAᵣₒUᵣₒC_{do} | 45 | 100 | 49 |
| | AᵣₒGᵣₒCᵣₒUᵣₒAᵣₒGᵣₒG_{do}A_{do}CᵣₒAᵣₒCᵣₒAᵣₒGᵣₒCᵣₒAᵣₒGᵣₒGᵣₒT_{do}C_{do}G_{do}T_{do}G_{d} | | | |
| 1091160 | CₘₛUₘₛUᵣₒAᵣₒAᵣₒUᵣₒUᵣₒUᵣₒCᵣₒUᵣₒAᵣₒCᵣₒUᵣₒCᵣₒUᵣₒUᵣₒGᵣₒUᵣₒAᵣₒGᵣₒAᵣₒUᵣₒC_{do} | 45 | 110 | 50 |
| | AᵣₒGᵣₒCᵣₒUᵣₒAᵣₒGᵣₒGᵣₒAᵣₒCᵣₒAᵣₒCᵣₒAᵣₒGᵣₒCᵣₒAoGᵣₒGᵣₒUᵣₒCᵣₒGᵣₒUₘₛGₘ | | | |
| 1091161 | CₘₛUᵣₒUᵣₒAᵣₒAᵣₒUᵣₒUᵣₒUᵣₒCᵣₒUᵣₒAᵣₒCᵣₒUᵣₒCᵣₒUᵣₒUᵣₒGᵣₒUᵣₒAᵣₒGᵣₒAᵣₒUᵣₒC_{do} | 45 | 120 | 50 |
| | AᵣₒGᵣₒCᵣₒUᵣₒAᵣₒGᵣₒG_{do}A_{do}CᵣₒAᵣₒCᵣₒAᵣₒGᵣₒCᵣₒAᵣₒGᵣₒGᵣₒUᵣₒCᵣₒGᵣₒUₘₛGₘ | | | |

TABLE 11b
crRNAs targeting LDLR

| | | | Norm. gene | SEQ |
|---|---|---|---|---|
| | | | disruption | ID |
| Name | Sequence (5′ to 3′) | Length | (%) | NO. |
| 1091152 | CᵣₒUᵣₒUᵣₒAᵣₒAᵣₒUᵣₒUᵣₒUᵣₒCᵣₒUᵣₒAᵣₒCᵣₒUᵣₒCᵣₒUᵣₒUᵣₒGᵣₒUᵣₒAᵣₒGᵣₒAᵣₒUᵣₒCᵣₒ | 40 | 100 | 51 |
| | AᵣₒGᵣₒCᵣₒUᵣₒAᵣₒGᵣₒGᵣₒAᵣₒCᵣₒAᵣₒCᵣₒAᵣₒGᵣₒCᵣₒAᵣₒGᵣₒGᵣ | | | |
| 1120137 | CₘₛUᵣₛUᵣₒAᵣₒAᵣₒUᵣₒUᵣₒUᵣₒCᵣₒUᵣₒAᵣₒCᵣₒUᵣₒCᵣₒUᵣₒUᵣₒGᵣₒUᵣₒAᵣₒGᵣₒAᵣₒUᵣₒCₘₒ | 40 | 10 | 51 |
| | AᵣₒGᵣₒCᵣₒUᵣₒAᵣₒGᵣₛGₘₒAₘₛCᵣₒAᵣₛCᵣₒAᵣₛG_{fo}C_{fs}A_{fs}GₘₛGₘ | | | |
| 1120138 | CₘₛUᵣₛUᵣₒAᵣₒAᵣₒUᵣₒUᵣₒUᵣₒCᵣₒUᵣₒAᵣₒCᵣₒUᵣₒCᵣₒUᵣₒUᵣₒGᵣₒUᵣₒAᵣₒGᵣₒAᵣₒUᵣₒC_{fo} | 40 | 60 | 51 |
| | AᵣₒGᵣₒCᵣₒUᵣₒAᵣₒGᵣₛG_{fo}A_{fs}CᵣₒAᵣₛCᵣₒAᵣₛG_{fo}C_{fs}A_{fs}GₘₛGₘ | | | |

A subscript “m” indicates a 2′-O-methyl modification. A subscript “r” indicates an unmodified, 2′-hydroxy sugar moiety. A subscript “d” indicates a modified, 2′-deoxy sugar moiety. A subscript “o” indicates a phosphate internucleoside linkage, and a subscript “s” indicates a phosphorothioate internucleoside linkage. The underlined portion of each crRNA is the target recognition portion, and the bolded nucleosides are linker nucleosides. The portion that is neither bold nor underlined is the CRISPR recognition portion of each crRNA. In the table above, the CRISPR recognition portions of the crRNAs recognize Cpf1.

### Example 10: Gene Editing Effects of Modified crRNAs

[0484] Modified crRNAs comprising a target recognition portion that is complementary to LDLR were designed and synthesized to test their effects on gene editing of LDLR as described in Example 9. The NHEJ incidence for each crRNA was not normalized. The values in the table below are the absolute gene disruption percentages. The results indicate that modified crRNAs edited the target gene.

TABLE 12
crRNAs targeting LDLR

| | | | Abs. Gene | SEQ |
|---|---|---|---|---|
| | | | disruption | ID |
| Name | Sequence (5′ to 3′) | Length | (%) | NO. |
| 1091152 | CᵣₒUᵣₒUᵣₒAᵣₒAᵣₒUᵣₒUᵣₒUᵣₒCᵣₒUᵣₒAᵣₒCᵣₒUᵣₒCᵣₒUᵣₒUᵣₒGᵣₒUᵣₒAᵣₒGᵣₒAᵣₒUᵣₒCᵣₒ | 40 | 26 | 51 |
| | AᵣₒGᵣₒCᵣₒUᵣₒAᵣₒGᵣₒGᵣₒAᵣₒCᵣₒAᵣₒCᵣₒAᵣₒGᵣₒCᵣₒAᵣₒGᵣₒGᵣ | | | |
| 1091153 | CₘₛUᵣₛUᵣₒAᵣₒAᵣₒUᵣₒUᵣₒUᵣₒCᵣₒUᵣₒAᵣₒCᵣₒUᵣₒCᵣₒUᵣₒUᵣₒGᵣₒUᵣₒAᵣₒGᵣₒAᵣₒUᵣₒC_{do} | 40 | 4 | 51 |
| | AᵣₒGᵣₒCᵣₒUᵣₒAᵣₒGᵣₒG_{do}A_{do}CᵣₒAᵣₒCᵣₒAᵣₒGᵣₒCᵣₒAᵣₛGₘₛGₘ | | | |
| 1091162 | CₘₛUᵣₛUᵣₒAᵣₒAᵣₒUᵣₒUᵣₒUᵣₒCᵣₒUᵣₒAᵣₒCᵣₒUᵣₒCᵣₒUᵣₒUᵣₒGᵣₒUᵣₒAᵣₒGᵣₒAᵣₒUᵣₒCᵣₒ | 40 | 18 | 51 |
| | AᵣₒGᵣₒCᵣₒUᵣₒAᵣₒGᵣₒGᵣₒAᵣₒCᵣₒAᵣₒCᵣₒAᵣₒGᵣₒCᵣₒAᵣₛGₘₛGₘ | | | |
| 1091164 | CₘₛUᵣₛUᵣₒAᵣₒAᵣₒUᵣₒUᵣₒUᵣₒCᵣₒUᵣₒAᵣₒCᵣₒUᵣₒCᵣₒUᵣₒUᵣₒGᵣₒUᵣₒAᵣₒGᵣₒAᵣₒUᵣₒC_{fo} | 40 | 18 | 51 |
| | AᵣₒGᵣₒCᵣₒUᵣₒAᵣₒGᵣₒG_{fo}A_{fo}CᵣₒAᵣₒCᵣₒAᵣₒGᵣₒCᵣₒAᵣₛGₘₛGₘ | | | |

A subscript “m” indicates a 2′-O-methyl modification. A subscript “r” indicates an unmodified, 2′-hydroxy sugar moiety. A subscript “d” indicates a modified, 2′-deoxy sugar moiety. A subscript “f” indicates a 2′-F modification. A subscript “o” indicates a phosphate internucleoside linkage, and a subscript “s” indicates a phosphorothioate internucleoside linkage. The underlined portion of each crRNA is the target recognition portion, and the bolded nucleosides are linker nucleosides. The portion that is neither bold nor underlined is the CRISPR recognition portion of each crRNA. In the table above, the CRISPR recognition portions of the crRNAs recognize Cpf1.

### Example 11: Gene Editing Effects of crRNAs

[0485] crRNAs comprising target recognition portions complementary to various targets were designed and synthesized to test their effects on gene editing. HEK293T cells were transfected as described in Example 2, with 3 μL of 100 μM of a crRNA listed in the table below. Genomic DNA was isolated and analyzed as described in Example 1 except that the PCR primers used to amplify the crRNA target site were one of the following: for the Complement 5 gene (C5, Table 13), forward: 5′-CATGGGGTAACCCAGCAAAC-3′ (SEQ ID NO: 58) and reverse: 5′-GGAAATAAGTGATGGGGCAGG-3′ (SEQ ID NO: 59); for the Empty Spiracles Homeobox 1 gene (EMX1, Table 14), forward: 5′-CCATCCCCTTCTGTGAATGT-3′ (SEQ ID NO: 60) and reverse: 5′-GGAGATTGGAGACACGGAGA-3′ (SEQ ID NO: 61); for the Glutamate Ionotrpoic Receptor NMDA Type Subunit 2B gene (GRIN2b, Table 15), forward: 5′-GCATACTCGCATGGCTACCT-3′ (SEQ ID NO: 62) and reverse: 5′-CTCCCTGCAGCCCCTTTTTA-3′ (SEQ ID NO: 63); for the Transthyretin gene (TTR, Table 16), forward: 5′-CAGAATCAGCAGGTTTGCAG-3′ (SEQ ID NO: 64) and reverse: 5′-CAAACCTAATGCACCAAAGC-3′ (SEQ ID NO: 65). The NHEJ incidence for each crRNA was not normalized. The values in the tables below are the absolute gene disruption percentages. The results, shown in the tables below, indicate that most crRNAs edited the corresponding target genes and that there is some variability among different targets.

TABLE 13
crRNA targeting C5

| | | | Abs. Gene | SEQ |
|---|---|---|---|---|
| | | | disruption | ID |
| Name | Sequence (5′ to 3′) | Length | (%) | NO. |
| 1091478 | CᵣₒUᵣₒUᵣₒAᵣₒAᵣₒUᵣₒUᵣₒUᵣₒCᵣₒUᵣₒAᵣₒCᵣₒUᵣₒCᵣₒUᵣₒUᵣₒGᵣₒUᵣₒAᵣₒGᵣₒAᵣₒUᵣₒUᵣₒ | 40 | <5 | 52 |
| | AᵣₒCᵣₒUᵣₒCᵣₒCᵣₒAᵣₒGᵣₒAᵣₒCᵣₒCᵣₒAᵣₒGᵣₒUᵣₒCᵣₒAᵣₒGᵣₒGᵣ | | | |

TABLE 14
crRNA targeting EMX1

| | | | Abs. Gene | SEQ |
|---|---|---|---|---|
| | | | disruption | ID |
| Name | Sequence (5′ to 3′) | Length | (%) | NO. |
| 1091480 | CᵣₒUᵣₒUᵣₒAᵣₒAᵣₒUᵣₒUᵣₒUᵣₒCᵣₒUᵣₒAᵣₒCᵣₒUᵣₒCᵣₒUᵣₒUᵣₒGᵣₒUᵣₒAᵣₒGᵣₒAᵣₒUᵣₒUᵣₒ | 40 | 16 | 53 |
| | GᵣₒGᵣₒUᵣₒUᵣₒGᵣₒCᵣₒCᵣₒCᵣₒAᵣₒCᵣₒCᵣₒCᵣₒUᵣₒAᵣₒGᵣₒUᵣₒCᵣ | | | |

TABLE 15
crRNA targeting GRIN2b

| | | | Abs. Gene | SEQ |
|---|---|---|---|---|
| | | | disruption | ID |
| Name | Sequence (5′ to 3′) | Length | (%) | NO. |
| 1091484 | CᵣₒUᵣₒUᵣₒAᵣₒAᵣₒUᵣₒUᵣₒUᵣₒCᵣₒUᵣₒAᵣₒCᵣₒUᵣₒCᵣₒUᵣₒUᵣₒGᵣₒUᵣₒAᵣₒGᵣₒAᵣₒUᵣₒGᵣₒ | 40 | 19 | 54 |
| | UᵣₒGᵣₒCᵣₒUᵣₒCᵣₒAᵣₒAᵣₒUᵣₒGᵣₒAᵣₒAᵣₒAᵣₒGᵣₒGᵣₒAᵣₒGᵣₒAᵣ | | | |

TABLE 16
crRNA targeting TTR

| | | | Abs. Gene | SEQ |
|---|---|---|---|---|
| | | | disruption | ID |
| Name | Sequence (5′ to 3′) | Length | (%) | NO. |
| 1091482 | CᵣₒUᵣₒUᵣₒAᵣₒAᵣₒUᵣₒUᵣₒUᵣₒCᵣₒUᵣₒAᵣₒCᵣₒUᵣₒCᵣₒUᵣₒUᵣₒGᵣₒUᵣₒAᵣₒGᵣₒAᵣₒUᵣₒUᵣₒ | 40 | n.d. | 55 |
| | GᵣₒUᵣₒCᵣₒUᵣₒGᵣₒAᵣₒGᵣₒGᵣₒCᵣₒUᵣₒGᵣₒGᵣₒCᵣₒCᵣₒCᵣₒUᵣₒAᵣ | | | |

The legend for Table 12 applies to Tables 13-16.

### Example 12: Gene Editing Effects of Modified crRNAs

[0486] Modified crRNAs comprising a target recognition portion that is complementary to DNMT1 were designed and synthesized to test their effects on gene editing of DNMT1 relative to unmodified crRNA 989549 (see Table 6). HEK293T cells were transfected as described in Example 2, with 3 μL of 100 μM of a modified crRNA listed in the table below, crRNA 989549 (“RNA Ctrl”), or no crRNA (“neg”). Genomic DNA was isolated and analyzed as described in Example 1 except that NHEJ incidence was not quantified. The resulting DNA gel is shown in FIG. 1 and indicates that multiple modified crRNAs comprising at least one modified sugar moiety in the CRISPR recognition portion edited the target gene.

TABLE 17
crRNAs targeting DNMT1

| | | | SEQ ID |
|---|---|---|---|
| Name | Sequence (5′ to 3′) | Length | NO. |
| 1096341 | CₘₛUᵣₛUᵣₒAᵣₒAᵣₒUᵣₒUᵣₒUᵣₒ^{m}CₖₒUᵣₒAᵣₒCᵣₒUᵣₒCᵣₒUᵣₒUᵣₒGᵣₒUᵣₒAᵣₒGᵣₒAᵣₒUᵣₒ | 40 | 30 |
| | CᵣₒUᵣₒGᵣₒAᵣₒUᵣₒGᵣₒGᵣₒUᵣₒCᵣₒCᵣₒAᵣₒUᵣₒGᵣₒUᵣₒCᵣₒUᵣₛGₘₛUₘ | | |
| 1096343 | CₘₛUᵣₛUᵣₒAᵣₒAᵣₒUᵣₒUᵣₒUᵣₒCᵣₒUᵣₒAₖₒCᵣₒUᵣₒCᵣₒUᵣₒUᵣₒGᵣₒUᵣₒAᵣₒGᵣₒAᵣₒUᵣₒ | 40 | 30 |
| | CᵣₒUᵣₒGᵣₒAᵣₒUᵣₒGᵣₒGᵣₒUᵣₒCᵣₒCᵣₒAᵣₒUᵣₒGᵣₒUᵣₒCᵣₒUᵣₛGₘₛUₘ | | |
| 1096344 | CₘₛUᵣₛUᵣₒAᵣₒAᵣₒUᵣₒUᵣₒUᵣₒCᵣₒUᵣₒAᵣₒ^{m}CₖₒUᵣₒCᵣₒUᵣₒUᵣₒGᵣₒUᵣₒAᵣₒGᵣₒAᵣₒUᵣₒ | 40 | 30 |
| | CᵣₒUᵣₒGᵣₒAᵣₒUᵣₒGᵣₒGᵣₒUᵣₒCᵣₒCᵣₒAᵣₒUᵣₒGᵣₒUᵣₒCᵣₒUᵣₛGₘₛUₘ | | |
| 1096346 | CₘₛUᵣₛUᵣₒAᵣₒAᵣₒUᵣₒUᵣₒUᵣₒCᵣₒUᵣₒAᵣₒCᵣₒUᵣₒ^{m}CₖₒUᵣₒUᵣₒGᵣₒUᵣₒAᵣₒGᵣₒAᵣₒUᵣₒ | 40 | 30 |
| | CᵣₒUᵣₒGᵣₒAᵣₒUᵣₒGᵣₒGᵣₒUᵣₒCᵣₒCᵣₒAᵣₒUᵣₒGᵣₒUᵣₒCᵣₒUᵣₛGₘₛUₘ | | |
| 1096349 | CₘₛUᵣₛUᵣₒAᵣₒAᵣₒUᵣₒUᵣₒUᵣₒCᵣₒUᵣₒAᵣₒCᵣₒUᵣₒCᵣₒUᵣₒUᵣₒGₖₒUᵣₒAᵣₒGᵣₒAᵣₒUᵣₒ | 40 | 30 |
| | CᵣₒUᵣₒGᵣₒAᵣₒUᵣₒGᵣₒGᵣₒUᵣₒCᵣₒCᵣₒAᵣₒUᵣₒGᵣₒUᵣₒCᵣₒUᵣₛGₘₛUₘ | | |
| 1096351 | CₘₛUᵣₛUᵣₒAᵣₒAᵣₒUᵣₒUᵣₒUᵣₒCᵣₒUᵣₒAᵣₒCᵣₒUᵣₒCᵣₒUᵣₒUᵣₒGᵣₒUᵣₒAₖₒGᵣₒAᵣₒUᵣₒ | 40 | 30 |
| | CᵣₒUᵣₒGᵣₒAᵣₒUᵣₒGᵣₒGᵣₒUᵣₒCᵣₒCᵣₒAᵣₒUᵣₒGᵣₒUᵣₒCᵣₒUᵣₛGₘₛUₘ | | |
| 1096352 | CₘₛUᵣₛUᵣₒAᵣₒAᵣₒUᵣₒUᵣₒUᵣₒCᵣₒUᵣₒAᵣₒCᵣₒUᵣₒCᵣₒUᵣₒUᵣₒGᵣₒUᵣₒAᵣₒGₖₒAᵣₒUᵣₒ | 40 | 30 |
| | CᵣₒUᵣₒGᵣₒAᵣₒUᵣₒGᵣₒGᵣₒUᵣₒCᵣₒCᵣₒAᵣₒUᵣₒGᵣₒUᵣₒCᵣₒUᵣₛGₘₛUₘ | | |
| 1096353 | CₘₛUᵣₛUᵣₒAᵣₒAᵣₒUᵣₒUᵣₒUᵣₒCᵣₒUᵣₒAᵣₒCᵣₒUᵣₒCᵣₒUᵣₒUᵣₒGᵣₒUᵣₒAᵣₒGᵣₒAₖₒUᵣₒ | 40 | 30 |
| | CᵣₒUᵣₒGᵣₒAᵣₒUᵣₒGᵣₒGᵣₒUᵣₒCᵣₒCᵣₒAᵣₒUᵣₒGᵣₒUᵣₒCᵣₒUᵣₛGₘₛUₘ | | |
| 1144245 | CₘₛUᵣₛUᵣₒAᵣₒAₖₒUᵣₒUᵣₒUᵣₒCᵣₒUᵣₒAᵣₒCᵣₒTₖₒCᵣₒUᵣₒUᵣₒGᵣₒUᵣₒAᵣₒGᵣₒAᵣₒUᵣₒ | 40 | 71 |
| | CᵣₒUᵣₒGᵣₒAᵣₒUᵣₒGᵣₒGᵣₒUᵣₒCᵣₒCᵣₒAᵣₒUᵣₒGᵣₒUᵣₒCᵣₒUᵣₛGₘₛUₘ | | |
| 1144246 | CₘₛUᵣₛUᵣₒAᵣₒAᵣₒTₖₒUᵣₒUᵣₒCᵣₒTₖₒAᵣₒCᵣₒUᵣₒCᵣₒUᵣₒUᵣₒGᵣₒUᵣₒAᵣₒGᵣₒAᵣₒUᵣₒ | 40 | 72 |
| | CᵣₒUᵣₒGᵣₒAᵣₒUᵣₒGᵣₒGᵣₒUᵣₒCᵣₒCᵣₒAᵣₒUᵣₒGᵣₒUᵣₒCᵣₒUᵣₛGₘₛUₘ | | |
| 1144247 | CₘₛUᵣₛUᵣₒAᵣₒAᵣₒTₖₒUᵣₒUᵣₒCᵣₒUᵣₒAₖₒCᵣₒUᵣₒCᵣₒUᵣₒUᵣₒGᵣₒUᵣₒAᵣₒGᵣₒAᵣₒUᵣₒ | 40 | 73 |
| | CᵣₒUᵣₒGᵣₒAᵣₒUᵣₒGᵣₒGᵣₒUᵣₒCᵣₒCᵣₒAᵣₒUᵣₒGᵣₒUᵣₒCᵣₒUᵣₛGₘₛUₘ | | |
| 1144248 | CₘₛUᵣₛUᵣₒAᵣₒAᵣₒUᵣₒTₖₒUᵣₒCᵣₒUᵣₒAᵣₒCᵣₒUᵣₒCᵣₒUᵣₒUᵣₒGᵣₒUᵣₒAᵣₒGᵣₒAᵣₒUᵣₒ | 40 | 74 |
| | CᵣₒUᵣₒGᵣₒAᵣₒUᵣₒGᵣₒGᵣₒUᵣₒCᵣₒCᵣₒAᵣₒUᵣₒGᵣₒUᵣₒCᵣₒUᵣₛGₘₛUₘ | | |
| 1144249 | CₘₛUᵣₛUᵣₒAᵣₒAᵣₒUᵣₒUᵣₒTₖₒCᵣₒUᵣₒAᵣₒCᵣₒUᵣₒCᵣₒUᵣₒUᵣₒGᵣₒUᵣₒAᵣₒGᵣₒAᵣₒUᵣₒ | 40 | 75 |
| | CᵣₒUᵣₒGᵣₒAᵣₒUᵣₒGᵣₒGᵣₒUᵣₒCᵣₒCᵣₒAᵣₒUᵣₒGᵣₒUᵣₒCᵣₒUᵣₛGₘₛUₘ | | |
| 1144250 | CₘₛUᵣₛUᵣₒAᵣₒAᵣₒUᵣₒUᵣₒUᵣₒCᵣₒUᵣₒAᵣₒCᵣₒTₖₒCᵣₒUᵣₒUᵣₒGᵣₒUᵣₒAᵣₒGᵣₒAᵣₒUᵣ | 40 | 71 |
| | CᵣₒUᵣₒGᵣₒAᵣₒUᵣₒGᵣₒGᵣₒUᵣₒCᵣₒCᵣₒAᵣₒUᵣₒGᵣₒUᵣₒCᵣₒUᵣₛGₘₛUₘ | | |
| 1144251 | CₘₛUᵣₛUᵣₒAᵣₒAᵣₒUᵣₒUᵣₒUᵣₒCᵣₒUᵣₒAᵣₒCᵣₒUᵣₒCᵣₒTₖₒUᵣₒGᵣₒUᵣₒAᵣₒGᵣₒAᵣₒUᵣₒCᵣₒ | 40 | 76 |
| | UᵣₒGᵣₒAᵣₒUᵣₒGᵣₒGᵣₒUᵣₒCᵣₒCᵣₒAᵣₒUᵣₒGᵣₒUᵣₒCᵣₒUᵣₛGₘₛUₘ | | |
| 1144252 | CₘₛUᵣₛUᵣₒAᵣₒAᵣₒUᵣₒUᵣₒUᵣₒCᵣₒUᵣₒAᵣₒCᵣₒUᵣₒCᵣₒUᵣₒTₖₒGᵣₒUᵣₒAᵣₒGᵣₒAᵣₒUᵣₒCᵣₒ | 40 | 77 |
| | UᵣₒGᵣₒAᵣₒUᵣₒGᵣₒGᵣₒUᵣₒCᵣₒCᵣₒAᵣₒUᵣₒGᵣₒUᵣₒCᵣₒUᵣₛGₘₛUₘ | | |
| 1144253 | CₘₛUᵣₛUᵣₒAᵣₒAᵣₒUᵣₒUᵣₒUᵣₒCᵣₒUᵣₒAᵣₒCᵣₒUᵣₒCᵣₒUᵣₒUᵣₒGᵣₒTₖₒAᵣₒGᵣₒAᵣₒUᵣₒCᵣₒ | 40 | 78 |
| | UᵣₒGᵣₒAᵣₒUᵣₒGᵣₒGᵣₒUᵣₒCᵣₒCᵣₒAᵣₒUᵣₒGᵣₒUᵣₒCᵣₒUᵣₛGₘₛUₘ | | |
| 1144254 | CₘₛUᵣₛUᵣₒAᵣₒAᵣₒUᵣₒUᵣₒUᵣₒCᵣₒUᵣₒAᵣₒCᵣₒUᵣₒCᵣₒUᵣₒUᵣₒGᵣₒUᵣₒAᵣₒGᵣₒAᵣₒTₖₒCᵣₒ | 40 | 79 |
| | UᵣₒGᵣₒAᵣₒUᵣₒGᵣₒGᵣₒUᵣₒCᵣₒCᵣₒAᵣₒUᵣₒGᵣₒUᵣₒCᵣₒUᵣGₘₛUₘ | | |
| 1144255 | CₘₛUᵣₛUᵣₒAᵣₒAᵣₒUᵣₒUᵣₒUᵣₒCᵣₒTₖₒAᵣₒCᵣₒUᵣₒCᵣₒUᵣₒUᵣₒGᵣₒUᵣₒAᵣₒGᵣₒAᵣₒUᵣₒCᵣₒ | 40 | 80 |
| | UᵣₒGᵣₒAᵣₒUᵣₒGᵣₒGᵣₒUᵣₒCᵣₒCᵣₒAᵣₒUᵣₒGᵣₒUᵣₒCᵣₒUᵣₛGₘₛUₘ | | |

A subscript “m” indicates a 2′-O-methyl modification. A subscript “r” indicates an unmodified, 2′-hydroxy sugar moiety. A subscript “k” indicates a cEt modification. A subscript “o” indicates a phosphate internucleoside linkage, and a subscript “s” indicates a phosphorothioate internucleoside linkage. The underlined portion of each crRNA is the target recognition portion, and the bolded nucleosides are linker nucleosides. The portion that is neither bold nor underlined is the CRISPR recognition portion of each crRNA. In the table above, the CRISPR recognition portions of the crRNAs recognize Cpf1.

### Example 13: Gene Editing Effects of Modified crRNAs

[0487] Modified crRNAs comprising a target recognition portion that is complementary to DNMT1 were designed to test their effects on gene editing of DNMT1. HEK293T cells are transfected as described in Example 2. Genomic DNA is isolated and analyzed as described in Example 1.

TABLE 18
crRNAs targeting DNMT1

| | | | SEQ ID |
|---|---|---|---|
| Name | Sequence (5′ to 3′) | Length | NO. |
| 1186843 | CₘₛUᵣₛUᵣₒAᵣₒAₖₒUᵣₒUᵣₒUᵣₒCᵣₒUᵣₒAᵣₒCᵣₒUᵣₒCᵣₒUᵣₒUᵣₒGᵣₒUᵣₒAᵣₒGᵣₒAᵣₒUᵣₒCᵣₒ | 40 | 30 |
| | UᵣₒGᵣₒAᵣₒUᵣₒGᵣₒGᵣₒUᵣₒCᵣₒCᵣₒAᵣₒUᵣₒGᵣₒUᵣₒCᵣₒUᵣₛGₘₛUₘ | | |
| 1186844 | CₘₛUᵣₛUᵣₒAᵣₒAᵣₒUᵣₒUᵣₒUᵣₒCᵣₒUᵣₒAₖₒ^{m}CₖₒUᵣₒCᵣₒUᵣₒUᵣₒGᵣₒUᵣₒAᵣₒGᵣₒAᵣₒUᵣₒ | 40 | 30 |
| | CᵣₒUᵣₒGᵣₒAᵣₒUᵣₒGᵣₒGᵣₒUᵣₒCᵣₒCᵣₒAᵣₒUᵣₒGᵣₒUᵣₒCᵣₒUᵣₛGₘₛUₘ | | |
| 1186845 | CₘₛUᵣₛUᵣₒAᵣₒAᵣₒUᵣₒUᵣₒUᵣₒCᵣₒUᵣₒAₖₒCᵣₒUᵣₒCᵣₒUᵣₒUᵣₒGᵣₒUᵣₒAᵣₒGᵣₒAᵣₒUᵣₒ | 40 | 30 |
| | C_{fo}UᵣₒGᵣₒAᵣₒUᵣₒGᵣₒGᵣₛU_{fo}C_{fs}CᵣₒAᵣₛUᵣₒGᵣₛU_{fo}C_{fs}U_{fs}GₘₛUₘ | | |
| 1186846 | CₘₛUᵣₛUᵣₒAᵣₒAᵣₒUᵣₒUᵣₒUᵣₒCᵣₒUᵣₒAᵣₒ^{m}CₖₒUᵣₒCᵣₒUᵣₒUᵣₒGᵣₒUᵣₒAᵣₒGᵣₒAᵣₒUᵣₒ | 40 | 30 |
| | C_{fo}UᵣₒGᵣₒAᵣₒUᵣₒGᵣₒGᵣₛU_{fo}C_{fs}CᵣₒAᵣₛUᵣₒGᵣₛU_{fo}C_{fs}U_{fs}GₘₛUₘ | | |
| 1186847 | CₘₛUᵣₛUᵣₒAᵣₒAᵣₒUᵣₒUᵣₒUᵣₒCᵣₒUᵣₒAₖₒ^{m}CₖₒUᵣₒCᵣₒUᵣₒUᵣₒGᵣₒUᵣₒAᵣₒGᵣₒAᵣₒUᵣₒ | 40 | 30 |
| | C_{fo}UᵣₒGᵣₒAᵣₒUᵣₒGᵣₒGᵣₛU_{fo}C_{fs}CᵣₒAᵣₛUᵣₒGᵣₛU_{fo}C_{fs}U_{fs}GₘₛUₘ | | |
| 1186848 | CₘₛUᵣₛUᵣₒAᵣₒAᵣₒUᵣₒUᵣₒUᵣₒCᵣₒUᵣₒAᵣₒCᵣₒUᵣₒCᵣₒUᵣₒUᵣₒGᵣₒUᵣₒAᵣₒGᵣₒAᵣₒUᵣₒ | 40 | 81 |
| | C_{do}UᵣₒGᵣₒAᵣₒUᵣₒGᵣₒGᵣₒT_{do}C_{do}CᵣₒAᵣₛUᵣₒGᵣₒT_{do}C_{do}T_{do}GₘₛUₘ | | |

A subscript “m” indicates a 2′-O-methyl modification. A subscript “r” indicates an unmodified, 2′-hydroxy sugar moiety. A subscript “d” indicates a modified, 2′-deoxy sugar moiety. A subscript “k” indicates a cEt modification. A subscript “f” indicates a 2′-F modification. A subscript “o” indicates a phosphate internucleoside linkage, and a subscript “s” indicates a phosphorothioate internucleoside linkage. The underlined portion of each crRNA is the target recognition portion, and the bolded nucleosides are linker nucleosides. The portion that is neither bold nor underlined is the CRISPR recognition portion of each crRNA. In the table above, the CRISPR recognition portions of the crRNAs recognize Cpf1.

The application's sequence listing, which the Patent Office published only in electronic form, follows.

SEQUENCE LISTING (81 sequences)

SEQ ID NO: 1 - DNA, 20 bp, Artificial sequence
  Primer
ctgggactcaggcgggtcac

SEQ ID NO: 2 - DNA, 25 bp, Artificial sequence
  Primer
cctcacacaacagcttcatgtcagc

SEQ ID NO: 3 - RNA, 20 nt, Artificial sequence
  Synthetic oligonucleotide
uaauuucuacuguuguagau

SEQ ID NO: 4 - RNA, 21 nt, Artificial sequence
  Synthetic oligonucleotide
agaaaugcaugguucucaugc

SEQ ID NO: 5 - RNA, 21 nt, Artificial sequence
  Synthetic oligonucleotide
aaaauuaccuaguaauuaggu

SEQ ID NO: 6 - RNA, 20 nt, Artificial sequence
  Synthetic oligonucleotide
ggauuucuacuuuuguagau

SEQ ID NO: 7 - RNA, 20 nt, Artificial sequence
  Synthetic oligonucleotide
aaauuucuacuuuuguagau

SEQ ID NO: 8 - RNA, 32 nt, Artificial sequence
  Synthetic oligonucleotide
guuucaauccacgcgcccacgcggggcgcgac

SEQ ID NO: 9 - RNA, 20 nt, Artificial sequence
  Synthetic oligonucleotide
uaauuucuacucuuguagau

SEQ ID NO: 10 - RNA, 20 nt, Artificial sequence
  Synthetic oligonucleotide
gaauuucuacuauuguagau

SEQ ID NO: 11 - RNA, 21 nt, Artificial sequence
  Synthetic oligonucleotide
gaaucucuacucuuuguagau

SEQ ID NO: 12 - RNA, 19 nt, Artificial sequence
  Synthetic oligonucleotide
uaauuucuacuuuguagau

SEQ ID NO: 13 - RNA, 21 nt, Artificial sequence
  Synthetic oligonucleotide
aaauuucuacuguuuguagau

SEQ ID NO: 14 - RNA, 20 nt, Artificial sequence
  Synthetic oligonucleotide
gaauuucuacuuuuguagau

SEQ ID NO: 15 - RNA, 21 nt, Artificial sequence
  Synthetic oligonucleotide
uaauuucuacuaaguguagau

SEQ ID NO: 16 - RNA, 20 nt, Artificial sequence
  Synthetic oligonucleotide
uaauuucuacuauuguagau

SEQ ID NO: 17 - RNA, 20 nt, Artificial sequence
  Synthetic oligonucleotide
uaauuucuacuucgguagau

SEQ ID NO: 18 - RNA, 43 nt, Artificial sequence
  Synthetic oligonucleotide
uaauuucuacucuuguagaucugaugguccaugucuguuacuc

SEQ ID NO: 19 - RNA, 39 nt, Artificial sequence
  Synthetic oligonucleotide
uucuacucuuguagaucugaugguccaugucuguuacuc

SEQ ID NO: 20 - RNA, 40 nt, Artificial sequence
  Synthetic oligonucleotide
uaauuucuacucuuguagaucugaugguccaugucuguua

SEQ ID NO: 21 - RNA, 34 nt, Artificial sequence
  Synthetic oligonucleotide
uucuacucuuguagaucugaugguccaugucugu

SEQ ID NO: 22 - RNA, 38 nt, Artificial sequence
  Synthetic oligonucleotide
uaauuucuacucuuguagaucugaugguccaugucugu

SEQ ID NO: 23 - RNA, 36 nt, Artificial sequence
  Synthetic oligonucleotide
uucuacucuuguagaucugaugguccaugucuguua

SEQ ID NO: 24 - RNA, 37 nt, Artificial sequence
  Synthetic oligonucleotide
aauuucuacucuuguagaucugaugguccaugucugu

SEQ ID NO: 25 - RNA, 36 nt, Artificial sequence
  Synthetic oligonucleotide
auuucuacucuuguagaucugaugguccaugucugu

SEQ ID NO: 26 - RNA, 35 nt, Artificial sequence
  Synthetic oligonucleotide
uuucuacucuuguagaucugaugguccaugucugu

SEQ ID NO: 27 - RNA, 42 nt, Artificial sequence
  Synthetic oligonucleotide
aauuucuacucuuguagaucugaugguccaugucuguuacuc

SEQ ID NO: 28 - RNA, 41 nt, Artificial sequence
  Synthetic oligonucleotide
auuucuacucuuguagaucugaugguccaugucuguuacuc

SEQ ID NO: 29 - RNA, 40 nt, Artificial sequence
  Synthetic oligonucleotide
uuucuacucuuguagaucugaugguccaugucuguuacuc

SEQ ID NO: 30 - RNA, 40 nt, Artificial sequence
  Synthetic oligonucleotide
cuuaauuucuacucuuguagaucugaugguccaugucugu

SEQ ID NO: 31 - DNA, 40 bp, Artificial sequence
  Synthetic oligonucleotide
  misc_feature (1)..(39): bases at these positions are RNA
cuuaauuucuacucuuguagaucugaugguccaugucugt

SEQ ID NO: 32 - DNA, 40 bp, Artificial sequence
  Synthetic oligonucleotide
  misc_feature (1)..(29): bases at these positions are RNA
  misc_feature (31)..(40): bases at these positions are RNA
cuuaauuucuacucuuguagaucugauggtccaugucugu

SEQ ID NO: 33 - DNA, 43 bp, Artificial sequence
  Synthetic oligonucleotide
  misc_feature (1)..(38): bases at these positions are RNA
  misc_feature (40)..(41): bases at these positions are RNA
  misc_feature (43)..(43): bases at these positions are RNA
uaauuucuacucuuguagaucugaugguccaugucugutactc

SEQ ID NO: 34 - DNA, 43 bp, Artificial sequence
  Synthetic oligonucleotide
  misc_feature (1)..(27): bases at these positions are RNA
  misc_feature (29)..(38): bases at these positions are RNA
  misc_feature (40)..(41): bases at these positions are RNA
  misc_feature (43)..(43): bases at these positions are RNA
uaauuucuacucuuguagaucugauggtccaugucugutactc

SEQ ID NO: 35 - DNA, 42 bp, Artificial sequence
  Synthetic oligonucleotide
  misc_feature (1)..(27): bases at these positions are RNA
  misc_feature (29)..(38): bases at these positions are RNA
  misc_feature (40)..(41): bases at these positions are RNA
uaauuucuacucuuguagaucugauggtccaugucugutact

SEQ ID NO: 36 - DNA, 41 bp, Artificial sequence
  Synthetic oligonucleotide
  misc_feature (1)..(27): bases at these positions are RNA
  misc_feature (29)..(38): bases at these positions are RNA
  misc_feature (40)..(41): bases at these positions are RNA
uaauuucuacucuuguagaucugauggtccaugucugutac

SEQ ID NO: 37 - DNA, 40 bp, Artificial sequence
  Synthetic oligonucleotide
  misc_feature (1)..(27): bases at these positions are RNA
  misc_feature (29)..(38): bases at these positions are RNA
  misc_feature (40)..(40): bases at these positions are RNA
uaauuucuacucuuguagaucugauggtccaugucuguta

SEQ ID NO: 38 - DNA, 39 bp, Artificial sequence
  Synthetic oligonucleotide
  misc_feature (1)..(27): bases at these positions are RNA
  misc_feature (29)..(38): bases at these positions are RNA
uaauuucuacucuuguagaucugauggtccaugucugut

SEQ ID NO: 39 - DNA, 38 bp, Artificial sequence
  Synthetic oligonucleotide
  misc_feature (1)..(27): bases at these positions are RNA
  misc_feature (29)..(37): bases at these positions are RNA
uaauuucuacucuuguagaucugauggtccaugucugt

SEQ ID NO: 40 - DNA, 45 bp, Artificial sequence
  Synthetic oligonucleotide
  misc_feature (1)..(1): bases at these positions are RNA
  misc_feature (3)..(40): bases at these positions are RNA
  misc_feature (42)..(43): bases at these positions are RNA
  misc_feature (45)..(45): bases at these positions are RNA
ctuaauuucuacucuuguagaucugaugguccaugucugutactc

SEQ ID NO: 41 - DNA, 43 bp, Artificial sequence
  Synthetic oligonucleotide
  misc_feature (1)..(35): bases at these positions are RNA
  misc_feature (37)..(37): bases at these positions are RNA
  misc_feature (40)..(41): bases at these positions are RNA
  misc_feature (43)..(43): bases at these positions are RNA
uaauuucuacucuuguagaucugaugguccauguctgttactc

SEQ ID NO: 42 - DNA, 43 bp, Artificial sequence
  Synthetic oligonucleotide
  misc_feature (1)..(31): bases at these positions are RNA
  misc_feature (33)..(33): bases at these positions are RNA
  misc_feature (35)..(35): bases at these positions are RNA
  misc_feature (37)..(37): bases at these positions are RNA
  misc_feature (40)..(41): bases at these positions are RNA
  misc_feature (43)..(43): bases at these positions are RNA
uaauuucuacucuuguagaucugaugguccatgtctgttactc

SEQ ID NO: 43 - DNA, 43 bp, Artificial sequence
  Synthetic oligonucleotide
  misc_feature (1)..(27): bases at these positions are RNA
  misc_feature (29)..(31): bases at these positions are RNA
  misc_feature (33)..(33): bases at these positions are RNA
  misc_feature (35)..(35): bases at these positions are RNA
  misc_feature (37)..(37): bases at these positions are RNA
  misc_feature (40)..(41): bases at these positions are RNA
  misc_feature (43)..(43): bases at these positions are RNA
uaauuucuacucuuguagaucugauggtccatgtctgttactc

SEQ ID NO: 44 - DNA, 43 bp, Artificial sequence
  Synthetic oligonucleotide
  misc_feature (1)..(21): bases at these positions are RNA
  misc_feature (23)..(24): bases at these positions are RNA
  misc_feature (26)..(27): bases at these positions are RNA
  misc_feature (29)..(31): bases at these positions are RNA
  misc_feature (33)..(33): bases at these positions are RNA
  misc_feature (35)..(35): bases at these positions are RNA
  misc_feature (37)..(37): bases at these positions are RNA
  misc_feature (40)..(41): bases at these positions are RNA
  misc_feature (43)..(43): bases at these positions are RNA
uaauuucuacucuuguagauctgatggtccatgtctgttactc

SEQ ID NO: 45 - DNA, 43 bp, Artificial sequence
  Synthetic oligonucleotide
taatttctactcttgtagatctgatggtccatgtctgttactc

SEQ ID NO: 46 - DNA, 43 bp, Artificial sequence
  Synthetic oligonucleotide
  misc_feature (1)..(38): bases at these positions are RNA
  misc_feature (40)..(41): bases at these positions are RNA
  misc_feature (43)..(43): bases at these positions are RNA
uaauuucuacucuuguagaucagcuaggacacagcaggtcgtg

SEQ ID NO: 47 - DNA, 43 bp, Artificial sequence; identical to SEQ ID NO: 46
  Synthetic oligonucleotide
  misc_feature (1)..(38): bases at these positions are RNA
  misc_feature (40)..(41): bases at these positions are RNA
  misc_feature (43)..(43): bases at these positions are RNA

SEQ ID NO: 48 - RNA, 43 nt, Artificial sequence
  Synthetic oligonucleotide
uaauuucuacucuuguagaucagcuaggacacagcaggucgug

SEQ ID NO: 49 - DNA, 45 bp, Artificial sequence
  Synthetic oligonucleotide
  misc_feature (1)..(1): bases at these positions are RNA
  misc_feature (3)..(40): bases at these positions are RNA
  misc_feature (42)..(43): bases at these positions are RNA
  misc_feature (45)..(45): bases at these positions are RNA
ctuaauuucuacucuuguagaucagcuaggacacagcaggtcgtg

SEQ ID NO: 50 - RNA, 45 nt, Artificial sequence
  Synthetic oligonucleotide
cuuaauuucuacucuuguagaucagcuaggacacagcaggucgug

SEQ ID NO: 51 - RNA, 40 nt, Artificial sequence
  Synthetic oligonucleotide
cuuaauuucuacucuuguagaucagcuaggacacagcagg

SEQ ID NO: 52 - RNA, 40 nt, Artificial sequence
  Synthetic oligonucleotide
cuuaauuucuacucuuguagauuacuccagaccagucagg

SEQ ID NO: 53 - RNA, 40 nt, Artificial sequence
  Synthetic oligonucleotide
cuuaauuucuacucuuguagauugguugcccacccuaguc

SEQ ID NO: 54 - RNA, 40 nt, Artificial sequence
  Synthetic oligonucleotide
cuuaauuucuacucuuguagaugugcucaaugaaaggaga

SEQ ID NO: 55 - RNA, 40 nt, Artificial sequence
  Synthetic oligonucleotide
cuuaauuucuacucuuguagauugucugaggcuggcccua

SEQ ID NO: 56 - DNA, 22 bp, Artificial sequence
  Primer
ggagacccaaatacaacaaatc

SEQ ID NO: 57 - DNA, 21 bp, Artificial sequence
  Primer
ctagactccgtctcaaagaag

SEQ ID NO: 58 - DNA, 20 bp, Artificial sequence
  Primer
catggggtaacccagcaaac

SEQ ID NO: 59 - DNA, 21 bp, Artificial sequence
  Primer
ggaaataagtgatggggcagg

SEQ ID NO: 60 - DNA, 20 bp, Artificial sequence
  Primer
ccatccccttctgtgaatgt

SEQ ID NO: 61 - DNA, 20 bp, Artificial sequence
  Primer
ggagattggagacacggaga

SEQ ID NO: 62 - DNA, 20 bp, Artificial sequence
  Primer
gcatactcgcatggctacct

SEQ ID NO: 63 - DNA, 20 bp, Artificial sequence
  Primer
ctccctgcagccccttttta

SEQ ID NO: 64 - DNA, 20 bp, Artificial sequence
  Primer
cagaatcagcaggtttgcag

SEQ ID NO: 65 - DNA, 20 bp, Artificial sequence
  Primer
caaacctaatgcaccaaagc

SEQ ID NO: 66 - DNA, 62590 bp, Homo sapiens
gtgctgggatgacaggcgtgagccacgtggtgcttaaaaaaggcaacaaaaaaccccccacacactgggtatagaagtggcatgggcctctatacactgtgagattcttggtactagctacaaattctgtgtatactcaagattttctagagtaggtgcaattaccccgttttacagatgaggacacagaggctgagccgtagtgacccacctaaggtcgtatagccagcaaatagatggaggttggattggaactgaggactttactcaagggctctcacaaacccttgggggcttctcgctgctttatccccatcacacctgaaagaatgaatgaatgaatgcctcgggcaccgtgcccacctcccagcaaaccgtggagcttggacgagcccactgctccgcgtggggggggtgtgtgcccgccttgcgcatgcgtgttccctgggcatggccggctccgttccatccttctgcacagggtatcgcctctctccgtttggtacatcccctcctcccccacgcccggactggggtggtagacgccgcctccgctcatcgcccctccccatcggtttccgcgcgaaaagccggggcgcctgcgctgccgccgccgcgtctgctgaagcctccgagatgccggcgcgtaccgccccagcccgggtgcccacactggccgtcccggccatctcgctgcccgacgatgtccgcaggcggtaggtaccatgggggggaacacggactcagggggacaggcagggcgctgggtggggggtcgcttcccctcggggtggccggtggccgctgctgacagacgggcgcgcatgcgtggggtggtgcggcgcgcagcggcagttggcgcgggcagggtggcacttccggtcgcgcgtgcccgggctgtttggcgccaaaatggaccgtggattcccccgtagctccctggtggctagaaactaggcggggtgggggttctcttttgatccccaaatacagcaagctttgggttcgtttccggggtccccttcttcaagcagcggtgggccgggctcttgactccagcttggtcgcacaggaagtgggcagcccgcggccaacggacacccctcgggcaccggcacttcggcctccacttccggtgtccggcccggtccccgggggcgcttctgtggtggggggtccctcagtgcctttcccccaaagctgtgcatctcgatggcggcctccagagacggatgtcacccgtcggggcctgggctgggctggctcatgttcgagagcccagccttccgtggggtactcattctgtcagttgggactgtgtggttcttgctccttgggaaagtccatgttttggcaggaactttaaccgtgcattgcagcgcagggcccgggaagcgtgaaggctgcatggttggtcttttcctgtaaatctgtgcctgtgagccgtgggcatcagggaagtcttgctaatgagaactggctacactttcgtgtgtgtttgtgtgtgttcatgggtgtgttctttagtgtgtgtctaatgttggaggccctggctttagcagttcatgcctctgtccaacttccgtgcacaaggatcagtgggagcactggtcccagccccttgttcatgaacgccatcagttcattcctgaaaacttgttcaagtgaggtgtgcgtgagtcagaggaaccctcaccaggcgtggacacttccagctggatttgtgaaagcactctttgccatttttctatttccttaggcttgttaactgacctggttgggccagtccggttctgatttgggtctttggggagggatggatatttggttcaacccccgctttttttcttttctttttttttttttttttgaaggctgggtgctgtggcttatgcctgtaatcccagcaatttgggaggcagtggcggacgaatctcttgagccaggagtttgagaccagcctgggcaacaaggcaaaaccccatgtctactaaaaatacaaaaattagcctggagtagtgccgtgcgcctgtggtcccaactactcaacagactaaggtgggagtatcacttgagccccagaggttgaggctgtgtgtagcgagctgagatcgcgctattgcactccagcctgggtgacagagtgagaccctgtctcaaaaaaagaaacactttttatttttagagatgggtctcactctgttgtccaggctggagtgccctggcacaattataactcactgtagccttgaactcctgggcttaagggatcctcagcctcctgagtagctgggaccacaggcgcccaccaccatgcccagatgactttcttagtttttgtttctgtatacgtgaggtttcaccatattgcccaggctggtcttaaacccctgccctcaagcagtcctcctgcctttgtgtcccaaaggttaggattacaagtatgagccatcatgccttaactactacttttttttgtttgtttgtttgagatggagtctcattctttcacccaggctggaatgcggtggcgtgatctcggctcactgcaacctccactttcagggttcaagtgattctcctgcctcagcctccgaagtagctgggattacaggtgcacaccaccacgcctggctaatttttgtgttttcagtggagtcggggtttctccatgttggtcaggctggtctcgaactcctgacctcgtgatccacctgcctcagcctcccaaagtgctgggattatagtcaaaccacttcttaaccagttagtgggtatatatcttcttgaatcatctgtgccagtattctcccaaaataaaacttgatttaaaatggaatggaagtgaaattatgaaagtgcctggcttcatgatgttacacccaattcagagaagtttgggcccggccttccttttttattccttttttttattttgtagagatggggtcttgccatgttgctcaggctggtcttcgattcctggcctcaagcgatcctcctgcctcagcttcccaaagtgttgggattacgggtgtgagccaccatgcccagcctgcccagccttcttgaaaacatgacctccactggctcaatgaccttaaacaagcgtatgccacctctatatccatagtctaggaataatgacatgggttttcagctggtattgggttaaatgagaatatgcatggcacataaaggttcacatgctagtggctaacttagcttgtttttttcagtttttttttaagagacaggatctcactgtgtcacccaggctggaatgcagtggcacagtcatggcttactgcagccttgaacccctgagctcaagcaatcctcctgccttagcctcctgagtggctggcacatgccaccatgcccaagttaatccttaaaaaattttttagaaggctgggcgcggtggctcacgtctgtaatcccagcactttgggaggctgagatgggcagatcacctgaggtcaggagtttgagaccagcctggccaacgtggcgaaaccccatctctactaaaaatacaaaaaaattagccaggtatggtggcaggtgcctgtaatcgcagctactcgggaggctgaggcaggataatcgcttgaacccaggagccgagattgcaccgttgcactccagcctgggcaacaggagcgaaactctgtctcagaaaaaaaaaaaatttttttttttagagatgagggtcttgctttgttgcccaggctggtcttgaactcctggactgaagcaatcctctgcgttggcctcccaaagggctgagattacaggcgtgagccacagggcccggccattattcctcaagagttcttaaaagtggatgctgcaggagttaactgccaggaagcaggaattcctgctaaggtctgctgcttgccaaagcctttcccttcaacaggggttgccagtaggccactggctcaggggctctgttggccctgtgcaaatattttgtttggctgaattggaataccattaggtgagccttacaatccaccactgaccctgggttccacatttctttacactcagattgcttcactgtaggcattggagttttggaggactgcttttgaccatgtggtagacattgaaattgtagtttatatgactcactccacagacttttttttttttttttacattttgaaaatatttcattaaatgaaaaataaacatggtatccaacagtacttgaaacttagatttttttttttttttaattgaggcagggtcttgctctgtggcccaggctagagtgcaatggtgtgatctcagctcactgcagcctccgcttcccgggtttaagcaattctcctgtctcagcttcccaagtagctgggattacaggtgtgcaccaccacgcccagctaatttttctttttccccctcgaggctgagccttgctctgtcgcccaggctggagtgcagtggccgtgatctcggctcactgcaacctccacctcccgagttcaagcaattctcctacttcagtgtcccaagtagctgggattacaggcgcccgccaccaagcccaggtaatttttgtatttttattagagactgggttttgccatgttgaccaggctggtttcaaactcttgatctcaagtgatccacttatcttagcctcccaaaatgctgggattacaggtatgatggtgtccagccggttcattgtttttattttattttattttattttattttattttattttattttattttattttatttttgagacagagtcttgtgctgtcgcccaggctggagtgcagtggtgcgaacttggctcactgcaacctccccctcccgggttcaagtgattctcctgccttagcctcctgagtagctgggattacaggcatgtgccaccacgcccggctaactttttcttatttttagtagaaaccggggtttaccgtgttggccaggctggtgttgaactcctggactcaagtgattcgcctgcctcagccccgcaaagtgttgggattacaggcatgagccaccgtgcctggccttttaattcattcttaagcctgctctcagacagctaggcttgcttctccacaataaagagtgttgaattttgtcggtgtatcccgcatggtgccattataacactgaaattagtgattatttcagggtctgttaccagagcgtgtctgccgtattcactgtatctgcagcttggagcacagtagactcaaatgcttgcatgccagctcttcccctgtacagcctggattaacactgatgctagcagactcctttgcacaactgattagctttcgtaactaccacagctttcttactgctagtcattctgtgatgggattaagctaggtcttgaactccttaactccagttccttggctactactgagtacatactgaataaggcaaaattgacttacctcttttgttttgctcccctgtggtagaattctaggggtacagactgctgggtttcaaatgccgccctacttgccagccgtatggctaagttattgaacttcttggtgccttggtgtttcatctataaaaagggggtggggctgcctgctcgacaggggtgttaggaagactgagcttatcagtacagatatgttgagagcagcacctgtccaaagcccttcatcactggttattacgtggtactgtgtgtacagtggggatgctgtgggtttggttccagaccactgcagtaaagtgaatctagcaagaaagtgagtcacacacacattttggtttcctagtatgtgtaaaagttattagactaggccgtgtgcagtggctcatgcctgtaatcccagcagtttgggaggccaaggcaggaggatcgcttgagccaaggagttcaagactagtctgggcaacataggaagaccccccccatctcaaaaaaaaaaataaagccaaaagtggtggcatgcacctggggtcccagctactcgggaggcagaggtgggaggatcacttgaacccatgaggtcgaggctgcagtttgccatgattgtgccactgcactccagcctgggtgaaggagtgagactctgtctcaaaaaaaaaaaaaaatcagctgggcgtggtggctcacgcctgtaatcccagcactttgggaggccaaggtgggcagatcacgaggtcaggagatcgagaccatcctggctaacacggtgaaaccccgtctctactaaaaatacaaaaaaaattagccaggcatggtggcacacgcctatagtcccagctccatgggaggctgaggcaggaaaattgcttgaacttgggaggcggaggttgcagtgagccgagatcatgccactgaactccagcctgggcaacagagcgagactccgtctcaaaaaaaaaaaaaaaatcatctgagtcttcagcgattcataatctttttgcaggtggagggtcttgcctcaaacttgccggcttaaaggacatacatttattaccttatgcaggtcagaaatctgatgtgggtttcaccggatgaaaatcaaggtgtaagcaggctgcattcctttctgggggctccaggggagaatctgtttcctattttggggtgttggcagaaggtggtagttgtaagactcaggtcccattttcttcactggttctaaactgagggtcgttgcccgcttctggaggcggtctcatccctcggctcatgcccccttcctctacctttaaagtcagcatttgcgggttgcatctctctctgacccgtcctccaacgttgcccgctctctgcagctagaaaggttctgtgttcttaagggctgaagtgattagattgggcccaccccagataatccaggataatctccccatctcaaggtctgtattcttagttacatctgcaaaatcgctttggccacgtaaagtaatatattcacaggttccagggattagggcatgaacatttttcggtgggtccactctttttgagatggagtctcgctctgtcacccaggctggagtgcagtggcatgatctcggctcactgcaacttctgcttcctgggttcaaatgattcttgtgcctcagcctcttgagtagctgggattacaggcgtgagccaccaagcccggttaatttttgtatttttagtagagatggggttttgccatgtttcccaggctggtcttgaactcctgagctcaggtgatctacccgcttcagcctcccaaagtgctgggattacaggcatgagccactgtgcccagtgggtctactcttttgcctactgcggatgccttcttgggcagccctgctccagctgccatgcagccggcctgaagaagctggtttgacagagacttgtaacttgtcttgcatggtccactatattttatttttagagacaaggtcttgctgtgtcacccaggctggaatgcagcggcacaattatagctcactgggctctagtgatcctcctgcctcagtctcctgagtagctaggaccacaggtgcatgctgccacaccaagctaattactattttttgtttaggcagggtctctgctgtgttgcccaggctggtcttgaattcctgagctctattgatcctcccgctttggcttcccgagtagctaggcctataggcacatgctagcacacccagctaattactaattactattttttgtagagacagggtctcgctgtgttgctcaggctggtcttgaattcctgggctctagtgatcctcccgcctcagcctcctgagtagctaagactataggtgcatgccaccacacccagctaattactattttttgtagagacaggttctcgctgtgttgcccaggctggtctcaaattcctgggctctagtgatccttccgcctcggcctcctgagcagctaggagtacaggtgcgtgctgtcatacccagctaattactgttttctcgtagagacagggtctcactgtattgcccaggctggtcacaaattcctgagctctagtgatcctcccgcctctgcctcccgagtagctaagactataggtgcatgctaccacagccagctaattattctttcttgtagagacagggtctcgctctgttgcccaggctagtctcgaattcctgggctcaagtgatcttcctgtcctggcttcccgagtgtagagattacaggcatgagccactgcgcccagccatggtctgctgtatttcagacgagcatttctggcgtagaggtgttagagtaatctaacattttataatttcttcctatccaatctatactagatacctctgctgggttagttttcttaacacggctctgatgtcattggttctacttccccttgactgctttggtgtttgttaactatggaacaagatggataagtgtgatgcttttgccctccctccgactgtccccagccacctctctggaggtgcctttccctccctgtatgtggccagtctcacgtttgtttcttgtgtgtttccagaaccagccacttctcaatggtgcccctgtttgagcagcttcctgtgcccggttcacacagagctgtcaacttcttcctgaggctgttataccctttctcttgggaatcccgcaggcgtgagctgtatttgccttattcctctgtggttgtttatatatatctttttttttttttttttttttgagacggagtttcactcttgttgtccaggctggagtgcaatgacgtgaccttggctcaccgcagcctccacctcccgggttcaagcgattctcctgcctcagcctcctgagtagctgggattataggcatgtgccaccatgcctggctgattctggatttttagtaaagacgaagtttcttcatgttggtcaggctggtctcgaactcctgacctcaggtgatccgcccgcctcggcctcccaaagtgctgggattacaggcatgagccaccgtgcctggccagctgtttatatatatcttatctcccctctgcagagggttcatctctgagggaagcactaggaaggaatcatagggtctcaggctgggcactaagccggcattctgagtcctctgctccgtccttcacggctgtctgcgaccctcctggcttcagcaggtgtgatcggtgtcatcacagttttaccagggaagggatgtcgctaaagttaccctcccgccagctcctcactgcctgcctgggatcccacctgccactctggggccaggcaggttaaatccagtttctactggatgaaacattctaggggttttgaaggtttctctattctctttgccaggctaaatatcccagttcatatgaggggttgaaagaaagcagacccattctgcaaggacaccttggtctccgcaatcagttgaaccttgtccttcacaccccaggcaacctcgggatcaggggactggctggcttggtcgaggtagaagccatgtccttccagttttctcagcggcgtgactgagaagtcaagtgtaacgctattaccacagcgtgtgtgcctctggctggaagtaccagtttctgtagccctcctgacttaaggctctccttggaccccagttgctacaagggtagaatgacttttgcctggaagaggttccttgtgctcctggaaatcctgatgtcaaagcatctttttttttttttttttttcttttgagacagggtcttgttctgttgcccaggctgaacaggctggattgcagtggtaccatcataactcactgcagcctcaacctcccaggctcaagcgatcctcccacctcagcctcccaagtagctggtaccacaggtgcacactaaccacacccagctaatttttacattttttttgtagagatgggatctctcagtgtagcccaggctggtctcaaactcctgacctcaagtgatcctcctgccttggcctcccaaggtgctgggattacaggcatgagccactgcgtcttgcctggccttgtagcaccttgagtccaagtgatacagtatatataatatacagtctatattaccactgtgtttgtagggtgctaagtgtctcttctacagagcagtcttttttttttttttttgagacagagttttgctctgttgcccaggctggagtgcagtggcatgatcttggctcactgcaagcttcacctcccgggttcacgccattcttctgcctcagcctcctgagtagctgggactacaggcgcccaccaccacgcctggctaattttttgtatttttagtagaggcggggtttcactgtgttagccaggatggtctccatctcctgacctcatgatccgcccacctcagccttccaaagtgctgggattacaggcgtgagccaccgtgcccggccctacagaatggtctttcctaaccacacagcaagtcaggaagtccctgcctagtgacacctacatctaatcacttagctctttgcctggagcagggcctggcattcagcaggtgctcatatgtgagcggcgctggtggggaatcagggcccgcatgacccagagcagctgttgtaagacatgggtccagcaaagcattcctcatgctgctgcctgcacttaccctctaggaaggccagcctggaggagccacttctgcccttcaggcaaatgataactgagcacctgtctgtgcgggtgctaggtggaaaggtccagagatggcagtggcctggtccctgcctggggcaccttctctccaccaacagacacttacccagctggttaggcctgttctcaccccgcagtctgtagttagcacccaggctgggaacaacagcctgtgttcctctccctttccttggtaccttctcttcttgttcctttatttttttctgaagagataggatcgccctatgttgtccaggctggactcgaactcctgcccacaagccatcctcccaccacagcctcctgagtagctggggttacaggcacgcagcaccgcggcactgcaccggctattgttcttttatttttttccctctttgtccctgaaagagtcaagctactaattgtcagtaatcaaatcagaccacgatttcccaggcaaactcctggcagttctacatttaggaatgactagctagagacatcctgaagaatgagttattcggggaggcgccagccacctcctctaacttcacctctatctgccctctgtgtgggtaccccttgcttccctggatgcttgactcccccatttcatcctcaaaatgccaccaccccccaccaggcctttaggaacatcagctggctgttccccacagtgtcctgtggccctgggctactcattctgacactggccatactgtggcacaccttgttatgggctgttgtcagacccaactggagaaagaccagctgtaggtcatttcccttacgggagtgccccaactatatgacctgccccctctttcctggtatctttttgagtcagggtctcactctgtctcctagattggagtgcagtgatgcaatcacggctcactgtggcctcgacctcccaggctcaggtgatcttccttcctcagcctcccaagtaactgggaccacaagcacatgccaccaaacccagttatttttattttattttattttattttattttgagacagagtttcactcttgttgcccaggctagagtgcaatggtgtgaccagctcactgcaacctctgcctcccgggttcaagtgattctcctgcctcagcctcccaagttgctgggattacagccacccaccaccacgcctggctaatttttgtatttttagtagagatggggtttcgccatgttggccaggctggtctcaaacccttgacctcaggtaatccacccaccttggccctcaggtaatccacccaactgctgctgtatgttgggattccaggcatcagccaccacgcccagccactaatttttgtatttttgtagagatggagtttcgccatgtttcccaggctggtctgaacgcctgggctcaagtgatccgctcgccttggcctcccaaagtgctgggattataagcgtgagccaccatgcctggtctctggtaccttttaaaatatacaggctgggcatgatggctcatgcctgtaatcccagcactttgggaggctgaggcaggtggatcgcctgaggtcgggagttcgaaaccagcctgaccaacacggagaaaccctgtctctgctaaaaatataaaattagctgggtgtggtggtgcatgcctgtaatcccagctactcgggaggctgagccaggagaatcgcttgaacctgggagtcggaggttgagctgagatcacaccattgcactccagcctgggcaacaagagcaaaaccctatctcaaaaaaaaaaaatatatatatatatacacacgtatatatacgtgtatatatatatacacacacatatgtatacatatatacgtatgtatacacatatatacgtatatatacacatatatatgtatatatacacacatatacgtgtatatatatacgtgtatatatatatgcatgccagacatggtgactcatgcctgtaatcctagcacttcaggagactgaggcaggcggatcacttgaggtcaggaatctaagaccagcttaaccaacatggtgaaaccctgtctctactcaaaatacaaaaaattaacgaggctggtggcacctataatcccagctacttgggaggctgaggtgagagaatcacttgaacccagaaggtgagggttgcagtgagctgagatcgcaccactgcactccagcctgggcaacagagcgagactccatgtctgtctgtctgtctatctatctgtataatgtatatgtatgtatgtatatatgtgtgtgtatatatatacacatatatacatacatatatacacacatactctgttacagagctgctgtgtgtgtgtgtatatatatatacacatatgtatatatacacatatacacatatatatgtatatatatacacacatatatatacacatatatatgtatatatatacacacatatatatacacatatatatgtatatatatacacacatatatatacacatatatatgtatatatatacacatatatatgtatatatatacacacacacacacatacacataattgtgttacagagctgctatgtaatctcacaatcatcagaaaaatgacccccaaaaggggaaccttgttcagatcagatgacttcttagcattaggcattccagtaggacactctagactcttgcggggagacaaaagccagcttagttttttctaacactcatatgttaaacttgtttgtgtccaaaacttctttagaactgtgatattcttacaggcaaatgaagttgcttaacaagtgtttgtattttctcccctatttcttcctcccaggctcaaagatttggaaagagacagcttaacagaaaaggtaatctccaccttaaaatttttcttattaccaaatctgactgacacactttgtggctcataaaaagaaatttgttttctttaaatggattttgcattttttcccatggagtttcaaagataatttggatattcttgttaaatgtcagcactaatttgctgctaatagttgggtggtggtggtgtttttttttgttgttgtttttgttttttgagacagagtctcactctgtcacccaggctagagtgcaatggcatgatctcggctcactgtgacctctgcctcccggattcaagctgttctcctgcctcagcctcccaagtagctgggactacaggcacgcaccaccatgcccagctaatttttatattattagtagagatggggtttcaccatgttggccagactggtcttgaacgcctgctcgtgatctgcccaccttggcctcccaaagtgctggaattacaggcgtgagccaccatgcctggcccaggttttttttttttttaaccaatctcagttcctaaacaatctactctggattgtaacttgtcctggtaacactgttttattgtgtttttgttattgttttgagatagggtctcattctgtagcccaggctggagtgcagtggcacaattttggctcactgcaaccttcgcctcccaggctcaagtgattttcccactcagcctcctgagtagctctaactacaggctcaagccaccatgcccagctaatttttaaatattttttgtaaagatgggattttgtcatgttgccccaggctggtcttgaactctggggctcaaagcaatccacttgcctcggcctcccaaagtgctgggattataggtgtgagccactgtgcctggccgacactttacagaagcacagtattattcttataaaccatgatatgtctccatctcacctccagctttcccatttttcaccactttggagacaggagtgaagtgatcctaatggaaattccctgaacacatttcatgactgtttagtgttttgactgagacagcattgcctgccattcactcattgtgatgtgatcaggcagctcaataatttgtgtattagtccactagtgaatagcttgggaatgtgggtactgctaaacctatatccttcccttaggaatgtgtgaaggagaaattgaatctcttgcacgaatttctgcaaacagaaataaagaatcagttatgtgacttggaaaccaaattacgtaaagaagaattatccgaggtaagtcagttctcagcatcctagcctctagaaaaatgtctcctcctagtaacttgtctgtgaccagggaggcagcaagatccccagctgtcctcattgcctgatgatgatgatgatgatgatgatgatgaaggaaacacatgtgtttccttgttctctgacacttgtttacattcactgctacttaaattatcctttcctgctgtaggagggctacctggctaaagtcaaatcccttttaaataaagatttgtccttggagaacggtgctcatgcttacaaccgggaagtgaatggacgtctagaaaacgggaaccaagcaagaagtgaagcccgtagagtgggaatggcagatgccaacagcccccccaaacccctttccaaacctcgcacgcccaggaggagcaagtccgatggagaggctaagcgtaagagcagatgattccttttatttttaattgtttttgagatggagtctcactgtgttgcccagtctggagcacagtggtgtaacctcggctcactgtaacctctgcctcccaggttcaagagaccctcctgcctcagcctcccaagtaactgggattagaggtatgtgccaccacacccagctaatttttgtatttagtagagatggggtcttaccatgttggccaggctggtccagaactcctgacctcaagtaatccacctgccttggcctcccaaagtgctgggattacaggcataagccaccacgcctggccctgcttaactctctttctttctttcttttttttttttttttaatgacagagtcttgctctatcgcccaggatagagtgcaatggcgcgatctcggctcactgcaacctccgcctcccagtttcaagcgattctcctgcctcagcctcccaagtagctagtattacaggcgggcaccaccatgcccagctaatctttgtatttttagtagagatggggtttcaccatgttggccagactggtctggaactcctgacctcaagtggtcctcccgccttagcttcccaaagtgctgggattacaggtgtgagccaccgtgcccggccccacttggctcattttcaacctagaagcaggctttggtagcatataagggggcagttaaacttggaccccaggtcagtgtgtccaggttcctttcttttgtacgcatcctcactagtaattactggacacttcctaactagcttagatgtgtacgtctttaaattttgtcttagctgggggtgtggtggctcatgcctgtaatccctgcactttgggtggccaaggtggctggatcacctgaggtcaggagttcgagaccaccctgcccaacatggcaaaaccctgtctctactgaaaatacaaaaaatttgccagacgtggtggcgggtgtctgtaattccagcctgggcaacaagagtaagacactgtctcaaaaaaaaaaaaatgttgttttcgaccaagttgcagcattagatcccaaaacatggctatgagtgtgacaggttgcagatgacaagtgctacaaatacttactccttctaagaccttatatgcctggttaaacatttattctcagactcttgcccagttttaggcaaaggaactctaatggaaattttttttttttttttttttttttgagatggagtcttgttgtctcccaggctgaagtgcagtggcgcaatctcggctcactgcaagctctgcctcccaggttcatgccattcttttgcctcagcctcccgagtagctgggactacaggcgcccgccaccatgcccggctaattttttttgtattttttagtagagacgggatttcaccatattagccaggatgatttcgatctcctgacctcatgatccgcccgcctcggcctcccaaagtgctgggattacaggcgtgagccaccgcgcccagcctcttctggaattttttaaaaaacaaacaataggatagtacttgagctcaggtctggttctcagctacttcatttttattttgttttattttattattatttttgagagagaatctcgctctgttgcccagtggcacgatctcggctcactgcaagctccacctcccaggttcatgccattctcctgcctcagcctcccaagtagctgggactacaggcgcacaccacgcctggataattttttgtatttttagtaggatggggtttcactgtgttagccaggatggtctcaatatcccgacctcgtgatccacctgcctcggcctcccaaagtgttgggattacaggcgtgagccaccatgcccagccttattttattttcttttaatttttattttattttttgagatggaggcatgcgccaccacgcccagttaatttttgtatttttagtagagacagggtttcaccatgttggccaaggtggtctcgaactcctgacctcaggtgatccacctgccttggcctcccaaagtgctgagattacaggtgtaagccacctcacctggccctttattttatttttttttgagatggagtcttactctgttgccaggctggagtgcagtggcacaatctcggctcaccacaacctccacctcctgggttcaagtgatttttttgcctcagcctcctgaggagctgggactacaggcacgtgccaccacgcccagctaatttttgtatttttaatagagacggggtttcaccatgttggccaggatggtctcgatctcttgaccttgtgatctgcccgtcttgcctcccaaagtgctgggattacaggcatgagccactgcacctggcctatttcttttttttctttctttcttttcttttttttttttttttaagagacagggtcttgctctgtcgccaaggctgtgtacagtggcgcgatcttggctcacggcaacccccatctcctgggttcaagtgattcttgtgcctcagcctcttgaatagctgggattataggtgtgtaccaccacgcccagctaatttttttgtatttttagtagagatgggggtttgccatgttgtccaggctgttctcgaatacctgagcttggattattttcccacctcagcctctcaaagttttggtattatagatgtgagccactgtgcctggcccacttcatcttttgatattttaacaagaggctctgtttcctggccttctttagcatttggcccctcaaataactgacatgatatggctcaacaaactggcaggtgctaactgccaacattagcaagctggttgttgactagaataaaaatgcaaagatgcttagtccttagaacctggcttcctgcaatagcttagtaatgttgaactgcattattgctgtgggctttctattgatagtggcttttttttttctttttaatgctttttcttctttaaacagctgaaccttcacctagccccaggattacaaggaaaagcaccaggcaaaccaccatcacatctcattttgcaaaggggtcagtatacgataaattggcggctgccttttttaggggccggctgttttgggatggaattggtagggcgtcacgtggcaattctgtcttccgtgttgtataggttttcatcttgcggttctgttctctagacatttatgaatagcatttctgaaaacgttacctgtttttactcatataggaaagttcaaatgtacacaaaatcatgagttttgtataatgaaccctgaaatacccatcatctagtgccaacagttatcaagttacagccgttgtttcatctatacccccatattgtgtgtccctgccccacctggattactttgtccatatatagtttagtatatttctagacaatgagatctcttttgacaactttttaaaaaattactcatattttacaataattgctaacatttagcagtcttttttttttgagacagcatctggctgtcacccaggctggagtgcagtggcacgatctcggctcactgcaacctctgcctcccgggttcaagtgattctcctgcctcagcctcctgagtatctgggattacaggcgcgcgccgccacgcctggctaatttttgtatttttagtagaggtggggtttcactatgttggccagactggtctcaaactcctgacctcaggtgatctgcccacttcaacctcccaaagtgctggggttacaggcgtgagccaccgtgcccagccaaaacagtctttttaacaaaccaaagtataatactgttctgatgtctttataaaaatgtaagaattccctgctatcagatatatagttggtatttacgtttttccctttgtggtgaacaagccgtgtggcaaacagacagcgtttggttgacttgttccttaaagttatagattccttccctcctattttacttaaaattcctcacagattttaaattccttcatctcttatcttcttgccatttacttgaagaaattcatttgtccaatagttcctagattgggccgattgcatccttgtggtgttccacaggtccccttgccttctgttccctataaactgataggattacaggactgatcagattccagctttttattttttgagactgacttttttttttttttgatacggagtcttgctctgtagcccaggctggagtgcagtggcatgatttcggctcactgcaacctccacctcccaggttcaagcgattctcctgcctcagcctcctgagtagctgggattacaagtgcccgccacaacccctggctaatgtttgtatttttggtagagacagggttttaccacgttggccaggctggtctgaaactcctgaactcaggtgatcctcatgccttggactcccaaagtgctgggattataggcgtgagccactgcacctggtctgaggctgactttatggatggtgctgtgtccctccatcagaaaggtgtgtgaggtctcttctctgacactagcagctgttgatcggtgtttagacccgtgatttcttaggacttacaagatggcaagacaacattctaaacccgtcattcagagaaacattaaacttgaagcctctttcaacatcctggtgaatgagggtccacttcaggccagctggaggcctagggtcttgttccactaatggttggcctcactgtgtgtgacagccctgccaaacggaaacctcaggaagagtctgaaagagccaaatcggatgagtccatcaaggaagaagacaaagaccaggtagggccagtgctttcatttcctgactctaccttaacttggtgtatttgatgattgtgacttcatatgtgttctgtccaagtaaataaaaaccctgtctagggctctatttagggctctccagagagacaggaccaatagaatgtatatgtgtgtatacagctataggtacatatatacatatgcacgtgtatgtatatatatataattcgtttgatttttttcttgtttttatgggtacatagttggaatatatatttatggggagagactttattttgagaaattggctcacaagattgtgaaagccagcaaatttgaaatctgcagggcaggctggaggtccaggggagaaatgatgtcatagctcaagtggcaaggcagtcttacatacatacatgttatatatatgtgtgtgtgtgtgtgtgtgtgtgtgtgtgtgtgtgtgtgtgtgtatgtatgtatgtatttagacttctttttttgagacttttttttttttttgagacagggttttgctcttgtggcacaatcttggttcattgcaacctcagcctcccgggttcaagtgattctcctgcttcagcctcccgagtagctgggactacaggcgcgtgccaccacgcccggctaatttttgtattttagtagggatggggtttcaccatgttgcccaggctggtctcccatgttgcccaggctggtctcgaactccttgagcttaggcaatctgcccgcctcagcctcccaaagtgccaggattataggtgtgagccaccgtgcccagccaatttgttttttttgttgttgttgttgttgtttttaattttttttagatggagtctcactctttcactcaggatggagtgcagtggcacgatctcagctcactgcaacctccgcctcctgggttcaagtgactctccatcctcagcttcctgagtagctgagactacaaggcatgtgccatcatacccagctaatttttatatttttagtagagatgggatttcactgtgttggccaggctggtcttgaactcctgacctcaagtgatccacccgcttcagcctcccaaagtgttgggattacagttctgtcttttttcttttcttttcttttctttgagacaggtctcattctgtcaccaggctggggtgcagtggcgcagtcatggctcactgcagcctcaacctcctgggcttaagcgatcctcccacctcaccctcccaagcagctgggactacaggcgcatgccaatgagctaagttttgtattttttgtagagatgaggtttcccatgttgcccagactggtctctaacaaataaattaaacaaattcctgacacaagatggagaatctttgattcttttacatagtatcaccaggcgatctctagtgatgggcagtgtgcctgcctacttctcggacctgcttttgttttggggttggtggggattaataccagagtaagagtttctcagatcttctccccaaaacccaggccccttcttttcccactcttgctctaaccatgtcaaatgtgttaatatttcaactcacacttttggtgttgaccttcccttgaaaccagtattctaatcttttttgttcttccttccctccacacaggatgagaagagacgtagagttacatccagagaacggtaagaatagttactatacctttctttttgttctacgagttgtgtaatcttgatcacaaaactttttcagaaagtttaaggccgggcacggtgactcatgcctgtaatctcagcactttgggaggccaagatgggcgaatcacttgaggtcaggagttcaagaccagcctgaccaacatggcgaaaccccgtctctactaaaaattcaaaacttagctgggcgtggtggaatgtgcctttaatcccagctactcaggaggctgagtcagaaggattgcttgaacccaggaggtagaggctgcagtgatctgagatcattccactgcactccagcctgagtgacagagcaagactccatctcaaaaaaaaaaaaaaaagtttaaaaagaagaactttatcgtgtgtttccatggcaaccatatcgttatgaagtatctgaatttggggtcagatcattagcgtttagattcaagtagaattctcctgttttcttggaaggaatgaatcgagggcagctggcattcgaaccaggtgtaaaagtcatatcaaatactaaatgttaaatgagtatgtgtctgtcagggctcctgagataatgaagattgcttttgggggaaagaggagctttatgaaaactgcttctttggggaagctcctggcactcacacttggggtctgtgttattttgcttgacagagttgctagaccgcttcctgcagaagaacctgaaagagcaaaatcaggaacgcgcactgaaaaggaagaagaaagagatgaaaaagtaaagctctatcacctctaagtttgttaattctcccttaatcctatatggtcccaatttccttccaggacgtggggacagggggtggggaacgtggaagaacaagatgggttttgctagtgatcgaaatgcctttgactttggctaaacacctttcaaacttgttttctcgtggtctctacatgaaaggtgggttatgagattgtgatagtgaggacccttgctacttatttgtgatattttattttattttatttatttatttatttttgagacagtctcccactctgtcacccaggctggaatgagtacagaggtgcgatctcggctcgttgcaacctctgcctcccaggttcaagtgattctcatgtcccagcctcttgagtcactgggactacaggcgcccgccgccatactcggctaattttagtggagatggggtttcactgtgttggccaggctgatcttgaactcctgacctcgagtgatccacctgcctcagccaccaaagtgctaggattacaggcatgagccaccacaccggccaacctatgccacttaatcaactagtcacagagcttcagtttgtcacctcgccttcttgcttctctggctgatgagatctttgtgaagatctaattttcagacgtacgaggtgctaaaactttttttttttttttttttgagatggagtcttgctctgttgcccaggctggaatgcagtggtgtgatcttgtctcaccgcaacctctgcctcccgggttcttgtgcctcagcctcctgagtagctgggattacaggtgcctgccaccacagccagataattttgtatttttagtaaagatggggtttctccatgttgatcaggctggtcttgaactcccaatctcaggtgatccacctgccttggcctcccaaagtgctgggattataggcgtgagccaccacacccggcctaaaatacttttcaaacttatttttttgtagttctctacatggaaggtgggttatgaggttgtcatagcgaggatctttgctacttatttgtggtatttatttaatttaatttaattttttttttttgagacagtctcccgctctatcacccaggctggagtgcagaggtgcgatcttggctcattgcaacctccgcctcccaggttcaagtaattctcatgtcccagcctcccaactagctggggctacaggcgcctgccaccacacctggctaatttttgtgtttttatttatttatttatttatttatttatttatttatttatttgagacggagtctcgctctgtcgcccaggctgaagtgcagtggcttgatctccgctcactgcaagctccacctcctgggttcacaccattctcctgcctcagcctcccgagtagctgggaccacaggcgcctgccaccatgcccggctaattttttgtatttttagtagagaaggggtttcaccacgttagccaggatggtcttgatctcctgacctcgtgatcctcccatctcggcctcccaaagtgctgggattacaggcgtgaaccaccgcgcctagccaatttttgtgtttttagtagagacggggtttcaccatgttggccaggctggtctcaaactgctgacctcgaacggtccacctgcctcagccatcaaagtgctgggattacaggcacgagccaccacaccggccaacctatgctacttaaatcaactagtcagtttcagtctgtcacctcagccaccttctctggctgacgagatcttggtgaagatctaattttcagatgtaggaggtgctaaaattctttagcatcatccagacataaagttgtattctcctctctgaagtcagaccagctctttccccagtccctcatcttctttgtaaaatctgagtctaaggttctatgcaatacagatgctgggtcctgtttttttttctgtttgttttgttttttaataagatgactgagggccgggtgtggtggctcatgcctgtaattctagcattttgggaggccgaggtgggtggatcgcttgagctcaggagttcagggccagcctgggcaatgtagtgagaccccgtctctgcaaaaaatacaaaaatcagctggatgtggtggagcttacaacaggcagtgtgcctgtagttccagcttctcaggaggctgaggcaggaagatcacttgagctcaggaggctgaggatacagtgagccatgattgtcccactgcaatccagcctggatgataaagtgagactggtcttaaaacaaacaaacaaacaaacaaaacaaacaaacaaaaaaaaaccaagatgactagaagtttcttaccaacttaggtaggtgacgagtgccttacttgggagcttagtaaaggatggctgtccattggggaatcaactaaaatgtacagtaattttttttgttttttgagacggagttttgttctacttgcccaggctgcagtgcagtggtgtgatctcggctcactgcaacctctgtctcctgcgttcaaacaaattctcctgccttagcctcccgagtagctgggattacaggcttccgctaccacgcccagctaattaactttttgtacttttagtagagacaggggttcaccatgttggctaggctggtctcgaactcctgaccccaggtgatccacccgcctcggcctcccaaagtgctgggattacaggcgtgagccactgcatccggccgctgtacaataatttttgaaccattcagtacttgaggttggtctttcttgctttttttctttttttttaattgagatggaattttgctctttcgctcaggctggagtgaagtggcgcaattttagctcactacaacctccaccccctgggttccagcgattctcctgcctcagcctctccagtagctgggattataggcgcccgccaccccgtccgcctaatttttgtatttttagtagagacagggttttgccgtgttggccaggttggtctggaactcctgacctcaggtgatccacccacctcagcctcccaaagtccaggattacaggggtgaaacaccacgcccggccgaggctggtctttcattgatcacctttcctaccctgatcctagttaaattagacagcagttgcagtcagtgcatacctcgaatttgtttcagaacaagcagtcctaacgggctagttcaaccaccaccttccaaagaaggaacctggggcaagatcgaaatccctcacctgtaagcatactctcaggatttcttcttgtagtaggaagatttgctaagcgttttttttatttttatttgagacggagtctcactctgtcgcccaggctggagtgcagtggtgcgatctccgctcacttcaagctccgcttcccaggttcacgccattctcctgcctcagcctcccgagtaactgggactacaggcacctgctaccacgccaggctaatttttttttgtatttttagtagagacggggttatttatttatttacttatttattttttgagacggaatctcgctcttgtcgcccaggctggagtgcagtggcacgatctcggttcactgcaagctctgcctcccaagttcacgccattctcctgcctccacctccccagtagctgggactgcaggcgcccgccaacacgcccggctaatttttttttttttttttttttgtatttttagtagagacggggtttcactgtgttagccaggatggtctcgatctcctgacctcgtgatctgcccatctcggcctcccaaagtgctgggattacagtagtgagccactgtgcccagctgcaaagtgtttcttaatattcctgacctttgcgatctcttcacagactaccacatgtggagtttctgagggttggatttgacttgcctgattctctggcaagatgtgtctggttctttaaatgcagcctcaggctgggcatggtggctcacgcctgtaatgccagcactttgggagaccaaggcagacggatcacttgaattcaagaccagtctggccaacgtgatgaaaccctgtctctactaaaaatacaaaaattagctggtcatggtggtgtgtgcctgtaaactcagctacttgggaggctgaagcaggagaattgtttgaacctgggagttggaggttacagtgagccaagagtacaccactgcactccagcctgggtaacagagtgagactccgtctcataaataaataaatgaataaatgcagtctcagaggatgtgttgttgtgtctcagttggagctacttttcagattgggccatcctatttcattcctttaatatcggaagtagagatttataataaagttactttctgtgaggctatcaacacttaactgatgacaagtagtagaggaattttgaagtaaaaatactgaaactgcagtgttgtagtatctcctttctaagagtttcatttcctgtctacttaccccactgaagaagaaaagaaaattgctgtcttgaacacctggcacaagtgatcctctcacctcagccttccaaagttctgagattacaggcatgagctactgtgcccactggtagacagtctttactcccaccagtggactctagaatcagttcaggtgttttatttccataggacactttaatagaaagatccaaaccaaatggaaaaaattaacttgtcttttttccctgcaacttaggaagaaaagagactccgaagtcaaaccaaagaaccgtaagtgcagcgaacctgcctttgtgctttgttgtgaaactgaattgctaacataagtatcttggtaaaataacgggttggtgtggaacagtgggcactaatcatatgtctcttatgtgggcaagttctgcttgtgaaaggtgagaccaccctgaagtgaaggctgaagttaacttttttaactttaatttaatttaatttaattttgagacggagtcttgctgtgtcacccaggctggagtacagtggtgcaatcctggctcactgcaacccccacctcccgggctcaagcaattctcctgtctcagcctcccgagtagctgggagtatgggcctgtaccaccatgcccaactaattttcgtatttttagtagagacagggtttcaccatattggtcaggctggtcttgaactcctgacctccgtgacccacctgcctcgcctcccaaagtgctgggattacggggtgaagttagcttcgatttctcctcccaaccccagggcccttctcagggttggtcacacagctgtgtgtcatgtggtagtgaaaggccatcaggtgagcagctgtgtcacttacctttcactgtgaaaatgctgtgtgacaaatggctccaaggccagaggcctagaacagtgagcatttttcaagctcacttgtctacagcttggtggctgtcggctgatcttgaggtggcttagtggggatggctgggctgacccagctctgcctccgcaatttggccaggctgggtacacgcttgtggctgtgccagaccacaagggcagaaatgaaaagtagcactttttcaaacctctgttgaaaaaagttgggccaggtgcagtagctcgcgcctataatctcagcactttgagaggctgaggcgggtggatcacttgaggtcaggagttcaagatcagcctggccaacatggtgaaaccccgtctctaataaaaatacaaaaaattagctgggtgtggtggtgcatgcctgtggtcccagctacttgggagactgaggcaggagaatcacttgaacccgggaggcggtggttgcagtgagctgagatcacatcactgcactccagggtaggtgatagagcgagactctgcctcaagaaaaaaaaaaaggaaaaaagaaaaagaaaacaattagctgaagcaaattttgagactgagcctgaatccagaggtgggcagaataccccacctgagcggcagggccctggcagagtgggaggtgaagactcggacccctgtgtgcagtcagctgtccacggtcactgactgacgctgatcgcacatcagcccagctctcaacctaggcaggccagacatgggtcttcctccaccgcaggctggattcccatcaggccacggaaatcatgacatccctttgtctgctttttgtattaaaccactggcatctctgaccaacattcagatggggtattgatggtgttcctgaagaccttgagtcctggagtagtaaatgccctctgggcttcctgcagtgaagacaggagaggcagcctgtcctctgaacctggggaggagcttgtgtcagcccttaggagctgttggccccggtgcagggccccccccgagctgaccagcctgtgtgtgtgttgtcttctgtgacagaacacccaaacagaaactgaaggaggagccggacagagaagccagggcaggcgtgcaggctgacgaggacgaagatggagacgagaaagtaaaggcgggttatttgtttctgaactccccctcattcttctgctcctgtttgcttgggcgggagtgcgcagggtggggctctgggttcaagtccagccccatccacccaggctccatggggccatccagactctgggaaggtcaccttttcctccttttgggggccgggatttgtggctggatgcctgtgctggatgcctagtgaacactcagttgtcctctgtctttcacactagagagggtctgtgtgagcctgggctgagatgtgcatgaagcatcctctcctgaggcctcactgctgagaagccttgacacacagtcagctctgacgcacatgtcagccacacctttgattctttcccagcctcctacgttctgagtctagctctccccctgccagcctccccagtctagtttagccaagtgcatgcgtttaaaccctaaagcatcatgtggaacactgctgggcctctgtcaaagtacaggatggccaggttgcctgcaggccctcctgcatgaactctagggaagggagctaggtcatcggtggggggcggcgggtccctatctaagagatgccgaagaccccaagagggtctctgggtttctgcctgttacaatctagagagtggagcccaaggtcacgggcttgctgggtgacaagcaccctcacttctgacccggtcgccagtgggcttccatccccaccccatagcaggggagcctttggtattgcctccagcctcccatccctcacctcttctgtccaaatgttggtcaccttactgtcagcactccttcagactggagtagtcacattactccctgccctctattggaaactggcaggggcctgagctcacactgccagcacttttgcctcatggtagaaagggatgtgagggctgggcatggtggctcactactgtaatcccagcactttgggaggctgaggtgggtggatcacttgaggtcaggagtctgagaccagccaggccaacatggtgaaatccggtgtcacctaaaaatataaaaattagccgggcatggtggcatgtgcctctaatcccagctacttgggaggctgaggtaggagaatcacttgaacccaggaggcagaggttgcagtgagccaagattatgccgctgcactccagcctgggcaacagagcgagactctgtctcaaaaaaataatatggtaataataataaaagcagtgcccagagaacaaggattgttggctgttccaccccagggggccccttgcacaggaggtgccatctctgcctcccaaagctctaagagccactgtcccccatcccaagagacagggtcttgctttgtcacccaggctggaatgcagtggtgcaatcacggttcactgtagcctcgacctcccaggctcaggtgatcttcccgcctcagcctcccaagtagctgggactataggcaggcaccaccatgtccagctaatttttttttttaattttttgtagagatagggttttgccatgttgcccaggctggtctcagtcaaactcctagactcgagttatccacctatctcagtcccccaaagtggcggagtggtaggattacaggcatgaaccgttgcattcagtctgtttggtttgttcttttttttttttttttttttttttttttttttttttttttttttaagatagtctctctctgtcatgcaatggtgtgatctcgagtcactgcaacctccacctcccaggttcaagtgattctcctgtctcagcctcctgagtagctgggattacaggcgtgtgctactatgcctagctaatttttatatttttagtagagacagggattcaccatgttggccaggctggtctctaactcctgatctcaaacaatccacctgcctcagcctcccaaggtgctgggattatgtgtgtgaggcaccacgcccggcgtgtttgtttgtttgtttgtttgtttgtttttgagacaggatcttgctctgtttcccaggctagagtgcaggagtgcagtggtgctatcatagctcactgcagtctcctgggttcaagtgatcctcccacctcagcctcccaagtagctggcactacaggcatgcaccaccatggatgtctactttttaaacttattttttgtaagccaggcgcggtgtctcacgcctataatcccagcattttgggacactgaggtgggcggatcacctgaagtcaggagtttgaaatcagcctgaccaacatggtgaaaccccagctctactaaaaatacagaattagctgggtgtggtggcgaatgcctgtaatcccagctactagagaggccgaggcaggagaatcgtttgaacctgagaggcagaggtgagccaagatcataccattgcactccagcctgggcaacaagagtgaatcaatctctctctctctctccatatatatgtatatattaaccatatatatatgctgctttttgtattaaaccactggcatctctgaccaacattcagatggggtattgatggtgttcctgaagaccttgagtcctggagtagtaaatgccctctgggcttcctgcagtgaagacaggagaggcagcctgtcctctgaacctggggaggagcttgtgtcagcccttaggagctgttggccccggtgcagggccccccgagctgaccagcctgtgtcatatatatatatagtatattttgcagagatggggtctcagcatgttgcccaggctggcctcgaactcctggcatcaagcaatcctcctgccttagcttcccaaagtgctgggtttacaggcacatgccactgcacacagcctgtaaataaagttttattggaacagagccacactttctcatttacattttgcctgtgggtgcttttgtgctaccatagcagagatgatcatcctgacacagaccacgtggtcagcaaagctgaaaatactgatcctctggctcttacaaaaacagtttgccaagccctggtctaggaggttctttagtgccctcttgttagtttcaggtggggaattaagtgagggaaagtgaagcctcgtgtctacccggtagatctgcccaggcctgcctgtcttccagctccacagtgctgggatccctaacctgtaacttcagtgtttgcattttatctcactctggctcagaaactaattttttcccttctttatctctctacctcccccttatttttctgtcaggatgagaagaagcacagaagtcaacccaaagatctgtaagtgtttaaaatgcttgtgcttttgtgtcatctggatcagtagaaagcctgttctaggccaggtgtggtggcttgcacctgtaatcccagcactttgggaggctgaggtgggtgaatcacctgaggtcaggagttcgagaccagcctagcctggccaacatggtggaaccctgtctgtactaaaaatacaaaaattagctgggtgtggtggcgggtgcctataatcccagctactcggaaggctgaggcagaactgctagaagccaggaggtggaggttgcagtgagccaagattgcgccactgcactccagcctggacaagagtgaaactctgtctcaaaaaaaaaaaaaaaaaaaagcctgttctagaaacctgtggtgatgtagatgtgtggggaccctggggcctctgaaggcctcgtctcgggatgacaagctggcagtgtgcctatagagctcccatgggtatcttgctttcccatggggaggcattagtttgtcactttccgtgcgagttggcgatgtggttagtgtttctaagctgctacttgctgtgtatctgttcaccctgcagagctgccaaacggaggcccgaagaaaaagaacctgaaaaagtaaatccacagatttctgatgaaaaagacgaggatgaaaaggtaaaggtctcacttttctttctttcttttttttttttttttttttccccaagacggggtttcgccatgttgcccaggctggtcttaggaaaaagaagactgggcgtggtggcgcacgcctgtaatcccagcactttgagaggctgaagcgggtgaatcacatgaggtcaggagttcaagaccagcctgaccaatatggtgaaaccctgtctctactaaaaatacaaaaattatctgggcatggtggtgcacgcccgtagtcccagctactcgagaggctgagataggagaatcgcttgagcctgggaggtggaggttgcagtgagccgagatcgcactccaggctggggacacagcaaaattagctgggcgtggtggcatatgcctgtagtcccagctgcttggaagcctgaggcatgagaattgcttgaacccaggaggcggagattgctgtgagctgagatcgtgccactgtactcctgcctggacaacagagcaagactctgtctcaaaaaaaaaaaaaaatgctgggcacagcggctcacgcctgtcttttcagcactttgggaggccaaggcaggcgcatcacctgaggtcaggagtttgaaaccagcctggacaacatggtgaaaccctgtctctactaaaaatacaaaaattagccagttgtggtgataggggcctgtaatcccagctgcttgggaagctgaggcaggagagtcacttgaacccaggaggtagaggttgcagtgagccgagatcacaccattgcactccaggctggggacacagcaagactctgtctcaaaaccaacaacaaaaaatacaaggacattggtcttattggatggggccccacctttattacctcatttaaccataattgtctcttaaagactctacatccaaatacagtcacatagcaggttagtcttaacatatgaattttgcaggggacatgactcggtctgtataccccctcatcaattgtttgcttacctttacattttagtatttatttttgagacagggtctcactcttgtcgaggctggagtgcagtggtacagtcatagctaccatagccgcaaactcctgggctgaagcaatcctcccacctgggccttcaaggtagctgggactacaggcagatggcactacacccagttaactttctatttttgtagagacagggttttactgtgttgcccaggctggtcttgagctcctgtgctcaagcagtcctcccacctgggcttcttcaagtgctggaattacaggcatgggccactgtgcctggccagttatttatttatttatttatttatttatttatttatttatttacttatgtatttgttttttgagacagagtctcgctctgccgccaggctggagtacagtggtgcgacatcggctcactgcaacctctgtctccctggttcaagctattctcctgcctcagcctcctgagtagctgggactacaggcatgcgccaccgcgcccaactaatttttgtatttttagtagagacagggtttcaccatcttggcgaggatggtctcaatctcttgatctcgtgatccatccgcctcggtctcccaaagtgctgggattacaggcgtgagccatcgcgcccggccctgtgcctggccaattatttgtttaccttgaggtgtccacttacacaggaaagctaaggttttaaaaaattggcttttcctctaaatcttttcaggaagtctttggttatgagatttatttattcatttattttgagatggagtctcactcactctgtcgcccaggctggaatgcagtggcatgatctctgcttactgcaacctctacgtctcgggttcaagcaattcttctgcctcagccttctgagtatctgagattacaagtgcccgcctggctaatctttgtatttttggtagagacgtgatttcgccatgttggccaggctggtctggaactcctgacctccagtcatctgtgtgccttggcctcccaaagtgctgggattacaggcatgagccactgtgctgggcctgactataagattttgtattctatgactttagatggtagagtgagtcagagctcacctgctggccctctcactgcctccctccccttctctctgttttatgataatcacttatacaaagttcttaacaccgaagcactatctgggtgtaaaacactctcttagcctttaatcctcttttgttttccctgtgtaggaggagaagagacgcaaaacgacccccaaagaaccgtaagaatttattcttgacattatcgaaagcagatggtaatgttaaaatgatggttctagaacaaaagggaaggggtttcagtaattgccagagcaaccttaggctcattttggatcgggttggtgaacataggaccaaggtgcgtcaggcaggatgcccctgcggtgaagagccactgtgaccacgcgcctgggcctcactgccacagccggtgcctccctgtgccacaggcacctcaggcagaaacctcacaggggcgattttgatattttctgaaacaattaaacaaacgatcttgtgatttttttttttcccccagaacggagaaaaaaatggctcgcgccaaaacagtcatgaactccaaggtaaacatctgccgggaataaagccggtggcggcgctcacgaggcggctgggagctgctctctgagtgccatcatctgtgttcctgctcccacagacccaccctcccaagtgcattcagtgcgggcagtacctggacgaccctgacctcaaatatgggcagcacccaccagacgcggtacgtacagctctcttcccagccttcctctgcctgtcccttgtcccactgctcaccagccccgtgtccttcaggtggatgagccacagatgctgacaaatgagaagctgtccatctttgatgccaacgagtctggctttgagagttatgaggcgcttccccagcacaaactgacctgcttcaggtaagtgcactttcgtgtgcatgtttgcttcgtggaaggaggcacatccccagaggtgcctgcgggctcacgattctggtgatgttttttagtgcctgacctgcaacatgtcttaagctaacacttcgtggataagagccaccgtggagggctgggcgcggtggctcatgcctgtaatcctagcactttgggaggccgaggtgagcagatcacttcaggtcaggagttcgagaccagcctggccaacatggcgaaacctaccgaaaatacaaaaagtagccaggtgtggtggtacgcgactgtaatcccaactactcgagaggcttaggcaggagaatttcttgaactctggaggcggaggctgcagtgagccgaggtggtgccactgcattccagcctgggcgacagagcaagactccgtctcaaagagccacgtggaaagctgatgaagggacaatagagctttgctgatttttggtttggtttttgggtttttacactacacatattacccctccattctgcccacatcctgagggtcacacgctcagatgaaggcctactctgtgctaggtaccagtgatctaggtgtcgtggatgtagctgctcaggtcctgccttcacggagccagaaatgggtgatacctgtcgggtagtgacagccacgacagattttaaaagcctggtgacatgcagagagaataagtgggaggaggaagttctgtgaagacgggagaggtaatgattttcagtaaagaccttgatggcctgtgagagaagaggccgaggggatggccggggtggggcaccctaggtagaaggggacaccattaccagggctcggaggggcctgtgccagctgtggaaggtgaatggtgagtctggtgtggtggttgctgggttggggctgggccacacagggccttgcaggcctcagcactgactctcctgtcctctgagggaaggtgcctggcgtccggcccgtaccttcaccgaggctcacgtcagctcttgagtgggcagaggccctgtgctctcaggcatccccagccccattttgctccctctccctgcgggtgcagttaccctccagggcttcaccttgttcttcgtgggaaatgcctcagctccaggaacggccctgcctccttttaggcctgggtggtattttccctctctgtgaagaggagggggaagtgccttggggacccctgttggaagcacccccaggcagcggttcctgtacccactgggagggcacccacacgttccccgtgcttggctgatggttgttcccctccctctccttctatgggatccttctatctagatcaagatgctgttgcgtccaccagcaaccgctagccccccgaggcctggcccaaagcagggccacacacctctgcctgctggtgtgagtgaggtgtgctgtggtgggcagagctggcaaccatgcccgagggcctcactctggccttcaccagggacaaaggcttgggggagcctggggctggggctgccagagtcctgagtgtctcagcttcctccctaagttgagatctatcatagattcgttcctggagggtggatggtggcctggaggacactttccagaagtcacatgccttctgtccactggagctggactgcctgagttatttaggggctctccatactgctgtacttggcttgaaactggcgatagaagccagtcatgggtggggtctggcctaccaaccagtgggtcctgcccctgcctggggcttagagcttctctcccatgtctcccctatggagagagcctccagcccacctgtgcagcggggagcgggaccccctcttctgtaggccctcccttgatccacgctggcttcatctctctgtctcttcttctgggccttacatcctgaggcagggctgcaacctattctgtctgccatgcctggtacgcagtaggggagctccgcaggaggtatgcagtgttttgtttgagcctttctggcttccaaggcactaagctgggtgagtgtggtggagggtgctctccagagacctgtgcagacttcatatgggggctctgaggatagcccagcatctttggccgggaaagggtggtccttgtctagatgagcaggtttgtaagcagaacacccagttcatgtctttttccttgagtttgacatcttgcctctctgtcttcactaaagaacgtgctcccgaatgtcaaggggcatctggacagtggggccgcaggtgtttgagatttatgcccaaaaggaggcagaagtccttccttcccacatcccttttcacactgttctataacctgctttattttctaaattgaggtctaactcgtataatataaaattaaccatatgaggtatcttgaataggtgaattcataggtatagaaagcagattggtggttgccgggggctgggggctgagggccggttgggaggagactggagagtgactgctacttgatgggaatgaggctttattaacatttgagtgacagaaatgttctgcagctgaatagagctagtggctgcactgcatagtagaaggtgttctagaaaccggtatttcccgcactgtaagtctgactgatcttttggtgttgctgttgcagacacacatacacttgatgcttaggtgggagaataaggtagaaactctgggtgatagaacgctgtcttaatccagtgttcccgcaaccaaaaaatgagtgtcggggccaggcatggtggttcagcctgtaatcccagcactttgggaggctgaggtgggtagatcactggagataaagagtttgagaccagcctgctacacatagtgaaaccccgtccctactaaaaatacaacaattagccgggcatggtggttcaggcctgtaatcccagctactcgggaggctgaggcaggagaattacttgaacccgggaggtggaggctgcagtgagccaagattatgccatcgcgctccagcctgagggatagagcaagactctgtctcaaaaacaaacaaaaaaagagtgtcagacttgtacattctctcattgcctcgtgcctgatctgaagtctgcacgaagacccgccttcacggcttagctggtaagcatgtgctttgtttcctgtctagtgtgtactgtaagcacggtcacctgtgtcccatcgacaccggcctcatcgagaagaatatcgaactcttcttttctggttcagcaaaaccaatctatgatgatgacccatctcttgaaggtaaggaatagtccgggattatgtttggggcacactttaaaaacagccaggcagggtggctcacatctgtaatcctagcactttgggggtctgaggccagaggatcacttgagcccgggagtttgagacgagcctggacaacatagcaagagcctgcctctattaaaaaaaaatatatagcatatatatatagtatacatatatacttatatatatgtataaataaaaaacatacttatgaagcaatagtcagctggagttgctgctgcctcttaaagttagggtgtgagactttgtgccaggagcagctgtaggccaagtcattgtgatgactgaggagcacccgacctggctgatgggatgtctgctgagtgggcgcttagagcgcctcctgggtttgggatgtgagtcagagcctttagtccatttcctttttctgctctaggtggtgttaatggcaaaaatcttggccccataaatgaatggtggatcactggctttgatggaggtgaaaaggccctcatcggcttcagcacctgtaagtgtgtggcccatcataggctggccggggtctgaaaggggccttcatgttctccttcctgggggctgacggggctctggtgggaattctcagcaggcttgcagaaggccatgtgactgggaaccttagcaggttcagttggggtagcctcttgtgttagttatgactggctctggaactgactctccagttgtaagagcaggtcttggccggatatggtggctcacacctgtaatcccagcactttgggaggccgagttggggggatcatttgaggccaggaattcgagaccagcctagcctggccaacatggtgaaaccccctctctaccaaaaatacaaaaattagccacgcatggtggtgcatacctgtaatcccagctacttgggaggctatggcaggagaatcacgtgaacccagcagacagaggttgcagtgagccgagatcacgccactgccctccagcctgggtgacggagcaagactctgtcctcccctgaaaaaaaaaaaagagcaggtcttattcttgcaacccaaacccagactgaattccaaacaccagagatgagctcaatgaaggcctactcagctagtcttcgctctctggctggctcagacaggcttcttcagaacaagccagctatgatgtgttgtgccctatgtttctgacatttgggtacgggatgacttttagactgttgggtgagtttggtagactcctccatgccctgtggccactgtaggcgccatcagattccagccccttttccacacctcctctgttcaccccagcatttgccgaatacattctgatggatcccagtcccgagtatgcgcccatatttgggctgatgcaggagaagatctacatcagcaagattgtggtggagttcctgcagagcaattccgactcgacctatgaggacctgatcaacaagatcgaggtaagagatcgagggtcctcagcatccgggattcccactggaaacttgccttcagaaccagcagacactgttcttcagttggatttaggccagtttggcttaagcatgagagaaacctgttctctttcaagaccacggttcctccttctggcctcaacttgaaccgcttcacagaggactccctcctgcgacacgcgcagtttgtggtggagcaggtggagagttatgacgaggccggggacagtgatgagcagcccatcttcctgacaccctgcatgcgggacctgatcaagctggctggggtcacgctgggacagaggtaaggatgcggcagggaccagagtgaagactggagaccggggagggtagagcatggcccacatcctctgtcccagtcctctgagatgctggaacctctcccgtaggcgagcccaggcgaggcggcagaccatcaggcattctaccagggagaaggacaggggacccacgaaagccaccaccaccaagctggtctaccagatcttcgatactttcttcgcagagcaaattgaaaaggatgacagagaagacaaggagaacgcctttaagcgccggcgatgtggcgtctgtgaggtaacctcacctgtgggtgctcccgctcccctaaggtggcccagcctctggcctgatctgaggactgctccatctttctctctgtggcttgagactctggctgctcaaatgtgacccctgagacagaaattagttagtggtctgggaggaccctgcatacttcattgaacgtcaataggacagatgtccacagaggcatgcttgggtgctttgctgataatgccactgtccttaattgaagagcctggcttctgggtggctctgctgtgcctgcatctcacagtctgaaggcccctgttggactgctaaaggggtattcacatctaagtgggcactttgtccagcttagatttgaggccctcaggaggcgtccctttctgtgagtttttaaaatatatgtttacttcactcaggaggaactaacttcctagtcctatgacccaaagaccaggactattttgatacctattacctgactttcttttggataaagactggcttcagggctttgcttttgatccccgctggcatctcttaacaggagcctgcatgtcctcaccattgttattttggttttattttatttttcttggttaacacacgtgtgtccaatgttttataacttctaaaatcttttttttttttttttaatttttttgagacagtctctctctgtcacccaggctagagtgcagtggcaccatctcagctcaccgtaacctccgcctcccgggttcaatcagttctcccacctcagcctcccgagtggctgggattataggcacccgccaccatacccggctaattttttttgtatttttagtagagatggggtttcaccatgttggccaggctggtcttaaactcctgaccttaagtgatctacctacctcggcctcccaaagtgctgggattacaggtgtgagccactgtgcccagccctaaaatcatttgtttttatttgtgtaactgttacgtgttgatactggtagatctagttatttcattttaaatattctgtagtattttgttaaatgaatatcctaacttactcctcaatgataggcacctcttcagtattgtaaatatgtggcagcatccttgagcaaagcttctcgcgagtgtatctgcttagaagtagcgttgctgggttgtgggtgtgtattcttaactttgatctagaagattgctctccaaaatggttctaccaacttaccatttgagcagtgtgcgttcttctttcctcacaccacctatctggcttcttaacccatctggagaatgggaagggaattttatttctctcacttaccatatttctaatgaggttgaatattgctttttttttttttttttgtagagacagggtcctgctgtgttgccttgcctggtctcaaactcctggcttcaagtggtcctcctgtcttggcctcccaaactgccgggattagaggcatgaggcactgcacccagccaaataggcacatttttaaaagtcttggttttgttgttgttgttgttgttgttgttgttgagatgggtctcgttctgtcacccagtctggaatgcagtggcatgattgtagctcactgcattctcaacctactgggctcaagtgatcttcccaccttagcctcccaagtagctgggaccacaggtgcacgccaccatgcccagctaattaaaaaaaaacattttgtagatgggattttgccatgttgcctaggctggtcttgaatgcctgaactcaagcagtcctcccgccttagcatcctgagttgccgggactgcaggaatttgtcacacgcctggctaattttaattttttgtagagttgggggtcttaatatgttgcccaggctggtcttgaactcttggactcaagtgatccatctacctctgcttcagcctcccaatgtactggttcaggtatgagccaccatgcccagcctaaaagtcttaattcaccgtttgtttcattgttgctaagggctgtgtgactcactttttttttttttttttaattttttgagacctaaaagtcttaatgcatcatttgtctcattgttagtaagggctgtgtgatttgccctttttttttcctttttttttttttttttttttttttttttgagatggagttttactcttgtcgtccaggctggaatatggtggtgtgatcttggctaactgtaatctccacctcccaggttcaggcaattctcctgcctcagcctcccaagtagctgggattacaggcacaccctaccatgcctggctaatctttgtatttttagtagagatggggtttcaccacgttggccaggctggtctgcaattcctgaccttaagtgatctgcctgcctcggccttctgaaatactgggattacaggcatgaaccactgtgcccagccctgatttgcctttttaatgccattttttaggtgtgtcagcagcctgagtgtgggaaatgtaaagcctgcaaggacatggttaaatttggtggcagtggacggagcaagcaggcttgccaagagcggaggtaggtcaggccgagtcttcctcctgtggcagaggacttgccagctggtggcagatgcactgtggagaagggcctgcatgtgtgggacagcaccaggattccttcgttaggcattgtctcaggacctgtccctgttatgaagaaaacagccccggttggtcttacttagaaaaggggccttaggtataaccagtgacattgcaggtgtcccaatatggccatgaaggaggcagatgacgatgaggaagtcgatgataacatcccagagatgccgtcacccaaaaaaatgcaccaggggaagaagaagaaacagaacaagaatcgcatctcttgggtcggagaagccgtcaaggtaacccttggagccccttggtcagctcactgccatgttcccaataagcaggttgccctctagtatctcgccaacctgacctctcaggcagcctgagccccggcactaagaaacctgtctgtttgcccctgagaagagcgggactggccaagagaccatgttccatggctcagtaccagcaaggcatttttgtgtggccacaaggctcagttctcctaatgtcccaaaatgggcatttgacacagttctaggggcatcaggcaggtgagccctcatagcttgtttttctgttttgttttgtttaagatggaatcttgctctgtcacccaggctggagtgcagtggcacgatctcagctcgctgcaacctctgcctcccaggttcaagcgattctcctgccccaccctcctgaatagctgagattacaggcgtgcaccaccatgccaggctaactttttttgtatttttagtagagacggggtttcatcatgttgcccaggccattctcgaactccggcctcaagtgatccacccacctcagcctcccaaagtgctgggattacaggcaggagccactgtgcctggcccctcatagcttgtttccaagagagctgtcacagccccctctggtgtggggtgggtctttttggggcaccaacagatggcctcccatccgttctgtggtcattggcttcactgaaggtcagttcctttaccacagtgtgagagagaggagtgagtatcctctgtgttgcttctctgacgtccataaattaaagatgcaatcagttcacttaattatgaggcttgccacctgctggctgcctgggccgtggctgagcccctgcaggaggacagacatgggtactgctgcatggcatgagtgcctctgcagggtagggggctgggaggaggctggggccacgaggccttgcagaggtgacacctgggctgagatggagaaggtcaggtaggacctagccacacgacctgggggagagctgcactgaggtggcagtcagcttactttgttggagaaaaggaaggaggcccctgcagctggagtggcttgagccaggggatgatgggcaggacaggggtcagggttcaggctgtggccttacagaccatggtgaggtattgtgggctgtgctgttaaaatcaaatcctgggacccgagtggcagagcagaagtgggagggacatggatgcccttggccacagcatctggccaaggaaggtggatgttcttcttttttcttattattgaagcccttgtagaacaggatgttctctttagcagcaactcttcattgacttcttaatgaaatcgagtcatgtcttactttaagtaacagaggaccatgcaagtcaaggccagcaaagaccctcagaatgatcctccatgaacttatgctctcattttcagactgatgggaagaagagttactataagaaggtgtgcattgatgcggaaaccctggaagtgggggactgtgtctctgttattccagatgattcctcaaaaccgctgtatctagcaaggtttgcatctttctttttgcttgacttctgcatgcactttctcatcaagtaggagatgcctgttttgccaaaatagcaccagcagctttttgccctagatgaaaactgaaaaggacgagtgctcctgcatagacttggtcacatatctgctggccaagtcagaactttctccccatgcccgtcttctgattccagggtcacggcgctgtgggaggacagcagcaacgggcagatgtttcacgcccactggttctgcgctgggacagacacagtcctcggggccacgtcggaccctctggagctgttcttggtggatgaatgtgaggacatgcagctttcatatatccacagcaaagtgaaagtcatctacaaagccccctccgaaaactgggccatggaggtgagtgcctggtgtccctcgtgagcccctgccttatcgtggagggtcactgctgacgtgcgttctgttttgttttgatttgtatttttttttaatttggttttttttttgtttttttttttgttttgagactgagtttcgctcttgttgcccaggctggagtgcaatggcatgatctcagctcactgcaacctccacctcctgggttcaagtgattctcctgcctcagcctcccgagtagttgggattacaggcacccaccatcacgtccagctaattttttgtatttttagtagagacggggtttcaccatgttggccaggctggtctcgaactcctgaccttaggtgatccacccgcctcggcctcccatagtgctgggaatacaggcatgagccactgcgcctggcctgacacgcattcttatctcccaagggaggcatggatcccgagtccctgctggagggggacgacgggaagacctacttctaccagctgtggtatgatcaagactacgcgagattcgagtcccctccaaaaacccagccaacagaggacaacaagttcaagtgagcactggggctggactcggggtcagcaggcactttcagcccacatcactcccttttcccgtgtgcttccgtctggttggcttccgccaacggccccccagtttgtgtctcttgctcgtcaaaggccagcctgactatgaatgatgctcaagtgtgtagatggcctggagttgctttaagtgtgtggatgacctggcgttgtctttgtaagagggttccctacccaggaacagggttcgtcttgccatttcaagacttcccgtgtgttcttcagtgtgtgcccagctcttgcatgtttttggctgtttcttagatattttctcctgtaaatgagacctcttatttgattcttttctttcctttttttttttctttttttttttttgagacggagtctcgctctgttgcccaggctggagtgcagtggtgcgatcttggcttactgcaaactcagcttcctgggttcatgccattctcctgcctcagcctcctgagttgctgggactacaggcgcctgccaccacacccggctagttttttgtatttttagtagagacgaggtttcactgtgttagccaggatggtctcgatctcctgaccttgtgatctgcccgccttggcctcccaaagtgctgggattacaggcgtgagccaccacacctgtcctcgattcttttgtaactgggtgactgctttgagggaagcttttattttttattttattttattattatttttttaattttttttttttttttttttttgagacagagtttcgcttttgttgcccaggctggagtgcagtggctcaatcttggcccaccgcaacctctacttcctgggttcaagcgattctcctgcctcagcctcctgagtagctgggattacaagcatgggccaccatgcccggctactttttttgtatttttagtagagatggggtttctccatgttggtcaggctggtctcgaactcccgacctcaggtgatctacccgcttcggcttcccaaagtgctgggattacaggtgtgagccaccgcgcccggcgagcttttattttttaatgtccaatgccccatgccttctttttaacctccgtacctcacttgtttcaactaaaagcagcagccagcacccccagaggagcaggtggcaaccagggaaacccaggaggccaagagggctccccgggggcatctgtgcttctcccataagtctcgtgctagctttggcttgatctctattttcattttattttttacttttttgtgatggagtttcactcttgtcacccaggctggagtgcagtggcacgatctcggctcactgcaacctccacctcctgggttcaagtgattctcctgcctcagcttcccaagtagctgggactacaggcgcctgccaccatgcccggctaatttttgtatttttagtagagacagggcttcaccgtgttggccaggctggtctggaactcctgaccttgggtcatctgctcccttcaggctcctaaagtgctgggattacaggcatgaactactgcacccaacctcatttacttatttatttatcacccaacctcttttatttatttatttatttatttatttatttatctgagacagggtctccctctgtcacccaggctggaatgcagtggtgtggtcacagctcactgtagcctcgacctgctgggctcaagtgatcttcctgcctcagcctcctgagtagctgggactgcaggcatgcaccaccctgcctggttaatgttttaaaaattttttgtagagacggggtctcactgtgttggccaggctagtctcaaacttctgggctcaagcgaccctcctgccttggcctcccaaagggctgggattacagacatgagccaccatgctgggccttgatctctatttttaaggccatcttcaagtctcctttaagggcttactagtcaagaataatgttgaatttcctcaaatacctgttgagcctttatggagagaacagtaggagtctctgctggattgagttcctcactgagccactcgggactgttgctcgtggtgtgttcttaaccatattctagaccctgttcattgatatcttagggtttttgtctcaatgactcaaaagttgcctgattttcttgctatgttctctctgggctttggtctcaaataagtgccttcaaaatgtcaacacaaagcacaagaaagccacctcttccttctagcatctgcaaatgttttttcctcttggttaccagagtctctggattaagctggcagtagctgctgcggccactgccggccacctcagggccttatgtttctgtccctttgtttccttcagattctgtgtgagctgtgcccgtctggctgagatgaggcaaaaagaaatccccagggtcctggagcagctcgaggacctggatagccgggtcctctactactcagccaccaagaacggcatcctgtaccgagttggtgatggtgtgtacctgccccctgaggccttcacgttcaagtaagtgccccctcggagcagccggggccagggcgctccaggctgagccaggctggctttgtggtgtccccctccttacagacattgccaatccctccgcaccagctgttgtcctagccgtcacgttggcataggtggcaaacagacaacataaatcgtgtagactgaccatgatgctattgcagagcaaagctgagcgtaaaagtcaactcgctggtttggctgggtgtggtttctcacgcctgtaatcccagcgctttgggaggccgaggcagtggggaatcatctgaggtcaggagtctgagaccagcctggccaacatggtgaaacctcgtctctactaaaaatacaaaaattagccgggtgtggtggtgcgcgcctgtagtcccagctactcgagaggcagagacaggagaatcacttgaacctgggaggcagaggttgcagtgagccaagatcatgccactgcactccatcctgggcaacagagtgtgactccgtctcaaaataaaaaaagaaaaaaaaagaacttactggataaagcgcgagggacagctgggggcccacccccaagttctgcctctgcccaaggacacctcctctccgtcccctactgtgaagtgggagagtgggatcttgcctgctggggctcgaagggttgagtgagttgaaagtgctccatacagtacctggcttaaagtaaaggtttaacggacatgagttacttcttggttagagggaatcacatcagatgacttctctgtgtcagaggatcgaggctcttccaggaaaaacctaaagccacagatcgtttccacactgatccattctgtgttttttctaagaatcagcgtgtggttggaattacagccaacgttttccagatgccttcccggctcacaattccatttccttagagccccagctcccttgccttagttcagttactgtgaattatgagaactggagaagcaggttccctccagccttggcacagttggggcgcgttaccccctctggttgtccttggtgggaaggggacacctccccgtagtgttttctgccagttgctcctggcaaagtgggagagtcagcacagagacgcctttggggcccgtcagactcctggggggcctagtggggagaacgtgacagctgacttccctaacggcaggccttcttcaaagaacagcttttccacactagtcagaccacactcccattgtcccaggccctgtggcgccttacattggcctccagtgtcgcttctagatcagagccttagtcagggtagcgtaggttgtatcatagcaacaaccccaaatcacagtgacttaaaaccacagaagctggactgggtgcggtggctcatgcctgtcaggagttcaagaccaagaccagcctggccgacatacctgtctctactaaaaataaattagccagggttagctgggtgtggtggtgggcacctgtaatcccagctacttgggaggccgaggcacgagaatcgcttgaacctgggaggaggagttgcagtgagccgagattgtgccactgcactctaacctgggtgacagagtgaaactctctcaacaaaaaccacggtagccgctgtctcgctcatacgaggtgcccatcacaggtcagcagaggactccacctgttgtgtcccttggatatctgggccgctggagtcagaagttgccagtgtttgagcccaagggaaagcacacaggacattccccaggcagtgacatcctctttggtcacttctgcccacgtcacatgccaggaaacacaagatgccaagtagtcgggaggcaggagcctggggtatttgagcagtgtcagccaccaccgtagccagtaatgcgcagagggtgaatgcgtgcttcaaactgtgagactaaatctgcagctaaatcttttttttttttttctgtgagatggagtcttgctctgtcacacaggctggagtgcagtggcacaatctcagctcactgcaacctctgcctcctgggttcaagcaattctcctgcctcagcctcccaagtagctggaattataggcatgtaccaccacacccggctaatttttgtatttttagtagagacagggttttaccgtgttggccagggtggtctcgaacttctgaccttgtggtccacctgccttggtctcccaaagtgctgggattacaggcgtgagccacaatgcccagcctaaatcatttcttagggtacacacctaccttaattcatcaggtgcttgactttaaatggttattttcactggtcagtcatgcctgactgaccactgcaaggtggaaggttcattgatgtcaagtgggtgcttctctgcagcatcaagctgtccagtcccgtgaaacgcccacggaaggagcccgtggatgaggacctgtacccagagcactaccggaaatactccgactacatcaaaggcagcaacctggatgcccctgagccctaccgaattggccggatcaaagagatcttctgtcccaagaagagcaacggcaggcccaatgagactgacatcaaaatccgggtcaacaagttctacaggtcagcagaggcctctgttcttccacgaggccacagactcttctagaaggctctgcctgaaacaaggttgtggcatagcacccacagttgttctaagagttaggttgaagtagctgtttttccaagtgtttctgattatcggtgggcactgataatgactagaattctagttcccagccctcacttttaggtccttattttaatgttgcagagccctttttccaaaagaaatccttaagctggctgggcactgtagctcacgcctctaatcctagcactttgggaggctgaggcaggaagatcacttgagtctaggagttcaagaccagcttgaggaaacgtagtgagaccccggccctaccaaaaaaaaaaaaaaaaaaagactagctgggcgtggtggcacacgcctgtaatcccagctacttgggaggctgaggctgaagggatcactgaaacccaggaatttgaggctgtagtgagccatgatcccaccactgcactccggcctgggtgacagccagaccccgtctcaaaagaaaaaacgggtagagtgcctgggcacccccagagaacctcccaagctccatctatgactgtccaggttctgtcccgctgtccccacctcttcccaggtcctcctttctgtctctgggattttttctctttcctaagcttttggcctattacgttttctttttctaagacccgagtaacttgcggtgattaggcattaacctgaaactagcctgtacaggaagctatacacttgcctcacctcttagctaacatagatcaaagatttcctgaagcctttgtaataacaggaaataaaacaagggctgtgagtggtacaggtgagagaaacacactcgagaggctgctaccggcaggcggacacagcagggcagggccaggcgtgcagagcaagcagccaagctgacctaatggttggggggtctctaccctgtggttccctaattgggggcgaatctaccttgcagttccctcatttggggaggggttatctttacctgcggttccctaagtaggggggtctttaccctatgactccctaactggggaggtctttaccctgcggttccataactggggggtctttaccctgcggttcccaactgggtcgggggtcattacctggcggttccctaattgtgggggaatctaccttgcagttccctaatgtgaggaggggatatctttaccctgtgattcccttactgggaggggtctttaccctgcgattccctaacttgggggatctttaccctgtggttccctaactagggggggtctttaccctgcagttccctaaatgggggggagtctaccttgcagttccccagtgtggggaggagatatctttaccctgcagttccctaactgagggggtctttaccctgcggttctcgaactagggggtctttaccctgcagttccctgagcaccccaggaacatggtactgtttaattcagcataagctcaccacaaaggagagctcctaacgaggcctctcccgctcgcaggcctgagaacacccacaagtccactccagcgagctaccacgcagacatcaacctgctctactggagcgacgaggaggccgtggtggacttcaaggctgtgcagggccgctgcaccgtggagtatggggaggacctgcccgagtgcgtccaggtgtactccatgggcggccccaaccgcttctacttcctcgaggtggtgcccctgcttgctagagggaaggcttcggggtcaaagttggccagaaggagtctgatgtcgggttatacacaaggcggcttggctgcagggtttcagcttttgtaagaagtgggtggttggctgacgtgaagctgttctgcaggagctttacgggggtctgagcagggttctccagagcacaagttgtatgagattcaagtggtcccggagtttaacactcctggtttttaaaaagtacgtcattagagaacctaacgttttagtgtcttggtgcaactgaacgttgaggaccatgaggcagcttccaccagcctgactggtgtcttagtatgagttggagaaggtgcccctgctcctgggtcccttgggccaggcgcctacgtccaggcccagcccacatgcctgtgcgggtggccctcgttatggagagggcccacgagtcagctgatcaagctcatgacttgtaaattgttggggcttggcctttccgtgttgttaccttaaaacgatacatccacgttctcccaggcatggatgaggtagcccaattggacagcagattctgcatagcactttttcctgttctagaaggtactctcaagtgcttgtaataggcatttcagtgtcagccagatcaaatgttagtattaataaaatggattgttttaagtttctattgtagcaaagtcaaactactcttattggtggctaattggtcatggccccactgagggagaaattaagtgactatcaaattgccttcttactagtctgcgttagagaggggacagtgcgtttctctcccaaacgattgcagttctctccttttcaggcctataatgcaaagagcaaaagctttgaagatcctcccaaccatgcccgtagccctggaaacaaagggaagggcaagggaaaaggtacgtcattgtatgagtttcttttcaagttattcttctgtaacttggaggctgcctgtgaatccctcagtgtaaaaccacctctggtgttactgactctgggacagcgaggccgcctgagttaacaaggcgcttgagagcaaggtggacttggactctgaggatcgggtttagcctctggcctctctcccccagggaagggcaagcccaagtcccaagcctgtgagccgagcgagccagagatagagatcaagctgcccaagctgcggaccctggatgtgttttctggctgcggggggttgtcggagggattccaccaagcaggtgagcgcccgtaggctccatctctgaatacctggtgagcccagaccgggcaggtgctacctgaaacgacttccaaccccggtcaccttcctgactcaagaatctccttccgaggccaggcacggtggcgcacgcctgtaatcccagcactttgggaggccgaggtgggtggatcatgaggtcaggagtttgagaccatcctggccaacatggtgaaaccccgtctctaataagaatacaaaaattagctgggcgtggtggtgtgtgcctgtagtcccagctactcaggaggctgaggtgggagaatcgcttgaacctgggaggcagagcttgcagtgagccaagatcacaccactgcactccagcctgggtgacagagcgagactccatctcaaaaaaaaaaaaaaatcttctggagagttgaaagcatggcttcgtgcttgatctgccaggcatctctgacacgctgtgggccatcgagatgtgggaccctgcggcccaggcgttccggctgaacaaccccggctccacagtgttcacagaggactgcaacatcctgctgaagctggtcatggctggggagaccaccaactcccgcggccagcggctgccccagaagggagacgtggagatgctgtgcggcgggccgccctgccagggcttcagcggcatgaaccgcttcaattcgcgcacctactccaagttcaaaaactctctggtggtttccttcctcaggtaaacgggtagaagccccccagtgttgccagacggcccggggctgtgccgcatgtcagcagtggtcattttcgccctgcactgaggcctctgccccccggaagctcacagctcagctctcaccagggagagactttgataacattcgtgaggggcttccggcacagtgggtcgtttcttccctctgtctgtggaggtgactcctgcagtctctcctgccccctacagctactgcgactactaccggccccggttcttcctcctggagaatgtcaggaactttgtctccttcaagcgctccatggtcctgaagctcaccctccgctgcctggtccgcatgggctatcagtgcaccttcggcgtgctgcaggtgggccctggggctggggcgggcagacagatgtggccagcacgtgacccggccagcagccagccatcccttactgaaggcagggttcaatggcataggcctgccatccaggcagcagaggctggcatggtgctctgtcccactggcggagtcaggggagatgcgtgctcagccggcccccagcaagtccaccgctagtgtctcttgagctgtgttctcgaacatgcctgggagggctggctacaatgggcttctcgccatgcagctcctggctcctttccctcgatggggaagggtgagcagcccaccatggagcactgtggaatggctgagtctgcacagagcgggaggggaagtgaggtgcgcagagccatgtgtaggcggcagctgttcgattggtttaaaagacagttttgctctgggtaactgcgcacacaaacccccacagatggccgagggttgcactccaggtggctgtgtctgcagggacagggatggacatagtctgtggggcccaggccttatctgaaaagcatcccccatcctctctgtatcagctcagcaattgagggcataattaaaaatgaaacagctatccagatgctagcacaggatgtctgcctaagtgggcaagcacttggctacccggtcccctagctcagcctcagggcgactcaggctcaccagacaagacttgttgcagccacgttctctgtccttgtgaccacagccatcagggaagcgacagggctcctggtctccagtgttctccccgagtgctaagaccttggggcccttgcagtgctttcagagctggccggacttccccgcagggtttgctcccaccttccccagtggctgtcccctgggctcagctgcttttgttctttatctgctccaaactcctctgaccaggagcacgcctgctgaggtaactggggatttctgcaagtgcactccgcattggccagccactcccgactcaggctgctgaccctgggcctgggtctggccagtccagttgggagtgtcccactgacggtggggttgtccgtccttctcccccacaggccggtcagtacggcgtggcccagactaggaggcgggccatcatcctggccgcggcccctggagagaagctccctctgttcccggagccactgcacgtgtttgctccccgggcctgccagctgagcgtggtggtggatgacaagaagtttgtgagcaacataaccaggtaggtggcccccgtcgctcctccacacactgccgagcaggcctcagtagctcatggggcccgtgagtactccctggtgaggcttggggaggagaggatggtacagcatctgccctgccacacggtgctctgccacatggcactctgccacctgtggtctccagttctgaccctgcatcatctgcttccctagtagatagcatgtgcagagcggccagccgcatgcttggctgtggtcatccacaaagcccacgccatagccccatccccccttccagatggcatccaggcacactgccacccatgtgacctcgggcagtgctgtgatctcgggagaaggccatctgagcaggcagggggtggcacctgtgatgaggggacagctgctgcgtgcatctccagaggtgttgacctcctcctctgttgcaggttgagctcgggtcctttccggaccatcacggtgcgagacacgatgtccgacctgccggaggtgcggaatggagcctcggcactggagatctcctacaacggggagcctcagtcctggttccagaggcagctccggggcgcacagtaccagcccatcctcagggaccacatctgtaaggtaatggcaccctgacagagcggctcctcctcgaggcccagcccagcagcctcgtgggaacagtcagcctgcccaagactcaggggagacatggaatctgatcccaggctcctcctcccgagtcctcagcctttgtgtgacccctggtctctcttgcatggtcatgggaagtgtcagagctcccgcagtcctggacttggtctggaatggtgtcaagccactgcccacccaccactgccttcccccttgctgcctctccccgcatgttttcccaggatgccaagaccagccctttcaccatcccctggcaccactccccttcccccaccctaaaggctcagcttagattcccacgctctcctacacctgcgctgcctcaggtccctgccgtggcctcgagccaagtgcgatatccctgactgtctctttcccgatgggcgtgagccccagggggcttcctggtcaccatggtgttcccagctcccagcccaccatggatgctcggatgctgctcacatgaggtgacagctgggccccccacactctttcaggacatgagtgcattggtggctgcccgcatgcggcacatccccttggccccagggtcagactggcgcgatctgcccaacatcgaggtgcggctctcagacggcaccatggccaggaagctgcggtatacccaccatgacaggaagaacggccgcagcagctctggggccctccgtggggtctgctcctgcgtggaaggtgggtcctgtaagttgtggttcccggtgggctgaggggaaggaaggcagagccctgggcctttggcctgtgaacctggaggccagggcagggcacagacacaccaagcctgggtgtcccagagaaggtagctgctgaccatgttgagtagtaaaagcaggctgggttcatggcccacacctataatcccagcactttgggaaaccaaggcgggaggatcacttgagcctgggaggttgaggaggctacagtgagctgtgattgtgccattgcactccagcctgggagacagagtgagaccctgtctctaaaaagaaaaaaaaaaaacaataaataaataataaaagcaggtcaggcacgatggctcacctctgtaatcccagcactttgggaggccaaggcaggcagatcacttgagatcaggagctcgagatcagcctgcccaacatggtgaaaccccatctctattaaaactacaaaaattagccgggcgtggtgtcgcacgcctataatcccagctatttgggaggctgaggcaggagaatcgcttgaaccccataggcagaggttgcagtgagccaagatcatgccattgcactccagcctgggcaacagagcgagacatataatactaataataaaaacagtgcccagagaacgaggattgttggctgctccaccccagggggccccttgcacaggaggtgccatctctgcctcccaaagctctaagagccactgtcccaagcctataccccatcccacaactgcagcctcatcactgtcctgtcttccagccggcaaagcctgcgaccccgcagccaggcagttcaacaccctcatcccctggtgcctgccccacaccgggaaccggcacaaccactgggctggcctctatggaaggctcgagtgggacggcttcttcagcacaaccgtcaccaaccccgagcccatgggcaagcaggtaggtggggagggggcatccgagggcctgggtcaggccctgtacttggcggcctaactaggtggaagtgtgggtttagccaagtgggggacagcaccccaggaccccaggcacctggcctctgcctcctgcccctccacgtccacgggacaagctcataggccaaggccatggccgtatgctgtcacagtgccatttccctccctgtccccgacggtgacccggcctgggtgctactgccctcgcccaccgcgcctctttcccccagggccgcgtgctccacccagagcagcaccgtgtggtgagcgtgcgggagtgtgcccgctcccagggcttccctgacacctaccggctcttcggcaacatcctggacaagcaccggcaggtcagtggggcggcgcccgctgggtctggacaggaaggaggcttctgtgcctgtcaccaggtggggctggggccagcgcagtcacttccgggaggacgcctgctggctgccgggtagccccatcactctcagtgggaagacggcccacaggagggacagtgctgagacatccgagtcaggctgcgtccctatgctggttccttactgtttgtttttgaggcagagattgagccagaaggacagtccgtcgcgctaaaggagcaggctaaaacccatggtggcgacagctcactcgctgtaggttcaaatgaactagcaccttaattcctacctgcttctcaggtgtcgggttggcttaacaagttagtctatgagttagtctcagttaagtgtattttcatcatagggcacgcgcattgcttaaaaaccagtgtccacggttcttgtgaaaaccacatttcacccctccccccgaatctggttctcgggaagcagccactctctcttttttttttttttttttgagatggagctttgttctttcgcccaggctggagtgaagtggcgtgatctcagctcaccgcaacttccacccccctggttttaagtgattctcctgcctcagcctcttgagtagctgggattacagtcatgtgctaccacacccggctaatttttgtatttttagtagagatggggtttcaccatgttggccaggctggtcccgaactcttgacctcaggtgatccgcctgcctcggcctcccaaagtgctgggattacaggcatgagccactgcgccggccagggaagcagccactcttaactgggagcgaaacgtgtctaggtggcccatttgtcttttttttttttttttctgagacagggtctcactctgtcccctaggctggagtgcagtgacatgatctctgcccactgcaacctccacctccagggttcaagtgattctcctgcctcagcctcctgaggtgctgggattacaggcatgtgccaccatgcccagctaattagtttttgtacttttagtagagacggggtttcaccatgttggcgaggctgctctcgaactcctggcctcaactaatccacctgccttggcctcccaaagtgctgggattacaggcgtgagccactgctcccagccccacgtgtctttgtctcaagtctttctgaagctcttcaaaggcccagtgacttgtggctgtggggcgggatgatgggccagttggagggtccaaggatcttgtgctggaagggttttgggcccatgtgagcaggaccagaacccttccccaaggggtgcaatgcccaggttgtcctccatctgagcaggggctggcagtacacctgcccccgggccttgggcctgggtgtccacatcaggcattgcccttctcccctcctgcaggtgggcaatgccgtgccaccgcccctggccaaagccattggcttggagatcaagctttgtatgttggccaaagcccgagagagtgcctcaggtatggtggggtgggccaggcttcctctggggcctgactgccctctgggggtacatgtgggggcagttgctggccaccgttttgggctctgggactcaggcgggtcacctacccacgttcgtggccccatctttctcaaggggctgctgtgaggattgagtgagttgcacgtgtcaagtgcttagagcaggcgtgctgcacacagcaggcctttggtcaggttggctgctgggctggccctggggccgtttccctcactcctgctcggtgaatttggctcagcaggcacctgcctcagctgctcacttgagcctctgggtctagaaccctctggggaccgtttgaggagtgttcagtctccgtgaacgttcccttagcactctgccacttattgggtcagctgttaacatcagtacgttaatgtttcctgatggtccatgtctgttactcgcctgtcaagtggcgtgacaccgggcgtgttccccagagtgacttttccttttatttcccttcagctaaaataaaggaggaggaagctgctaaggactagttctgccctcccgtcacccctgtttctggcaccaggaatccccaacatgcactgatgttgtgtttttaacatgtcaatctgtccgttcacatgtgtggtacatggtgtttgtggccttggctgacatgaagctgttgtgtgaggttcgcttatcaactaatgatttagtgatcaaattgtgcagtactttgtgcattctggattttaaaagttttttattatgcattatatcaaatctaccactgtatgagtggaaattaagactttatgtagtttttatatgttgtaatatttcttcaaataaatctctcctataaaccaccctgggtgggtattcgtgatttgcacgggacttctggctgaggtcagacaggaacaagctcttccatgctgaaggcgacccacgtggagtttgaagctagcacgtttgaagctagacactccgtgtgtctgtctgtgtttgttcagaactgagtcacgtgagttgatccccatgacatgcaaatggaacttgctagtgtagcttccaggaaagccttttaaaggaagtcttggctggccttccccgtggctggtaggccttctttggtctgaagtgggttgtgatgcctggcagtggagcagccatcctgtgaccatgaggcagagctctgtgctgcaactggtggaataaggagagagaagtcaccactgagctgcccttggagccccggccacccca

SEQ ID NO: 67 - DNA, 451000 bp, Homo sapiens
ctctttgggttgagttggcagaatacctccaaaagtgtcattagcagcctcaagcaagagcttctcctcaataagcaatgctgtgaaatatgatgcaacattttgtctcattagaatattgttttctgtgttgctggactaggagttaggaaatatatatttatgacactaagaaatggtgtttcgaatttcatgaatctgggcgatccttgaaatagttttattttatttatttatttttgagacggagttttgcttttgttggagtgctggagtgcaatggcatgatctcagctcaccgcagcctctgcctcctgggttaaagcgattctcttgcctcagcctcccaagtagctgggattacaggcatgtgccaccacacctggctaattttgtatttttaatagagacggggtttctccatgttggtcaggctggtcttgaactgccaacctcaggtgatccactcgccttggcctcccaaagtgctgggattacgggtgtgagccaccacacctggctgaaatagttttattgagaggcttatggtccatgaaggcaaaggttattagtgagaagagcaagtgagtgacaaggagccagaaaaaaaggagacgaatcttagttccattgagtagtcaatgggcaatgaatgccatgggcaagggatattactttccacttcacaatctgtgtggtccctagaattagctatttcagaaccagaaaaactgcttgataaagtggcttcaaatagtcataaaaaatatctattgaacctctactgcatgtctggaattgagccaggtactgggaatatatggatgacttaggttatggtctgtccccttagggagctaaacaactagtttggaagacaggaaattgacaccagaatataattttaagtttaactttatgaaattgcctttttattatatgtcaataatggttatttcatatgattggcaatttcgtatgattgaatatcaatagtctcacatggttcaacatgaatagctacagaggtaatatttttccctatagtgggccagtacctggttaatgaatgcaataagttatcacccagtcagtttgataactgatcaagcaaactcttccatacattgctgaatacagaaaatgagagtggaggggatggtggtgaggtgtcatctctcatttcaaaattcttgcaatttttacagaaatcaattcaggcttggttgactgaaaaatatccccagaggaggtgggacttgagctggaaactgaagaggagtgtggactcaattaggtggaggaagtatgagcgttcattcttccctgtacacttggaaaagtgaacagggtggaatggaattgcaacagggttcaggtagggaggaaaaggaaagaaaatagggaagaatagtataattttggtgaagggactgaggataggaaggggaacgtgggctatgagccagaaataaaaaatataaaaatttaaaaagtagattcaaggtcaacccatgaagatccttgagtgagcttggatgttattctgaagctaatggaccaggtaacggtaattttcctggaaaattcagggaagagtgtttcaggaaatctctattaggttcttgctttctgcattctatactcctcttggaatcggcgttctaacaactgcaaacctgcccataggcaggtgaacttgaaaaccctggagacaaattattagaggggcttgggttggctgttgtgtatcaagagggcacagcaactctggggtgcttcgacacttccccaaagtagtgaaagatcagttctaactcttagaaaaatagaaaaccattactgagaaggaataatttgcatgtgaacacactctatttgtgttttcacacaatgcttatgtgttcgtgtgtgttaaatatgttagattcaaaaattaagcctgagaaaaaccaggaaacagaagaattactgtagctcagaagtatgagtagtctggtctacaggacagcaaaaacatatctgatggcttctacagactaaagttccaagccactaggtatatccactcacacagccttctctcctgtgcgtttgtatggccgcttctcaggaatgctggtgagaagcccatgatataaccaatatgaaaatgttccaccactgtagtattctagatatttgaaaagacaatggatgagaatgaaaatgatgcatatacaataatattaatgttaaaagtaaacaatactacaggtggtgataagggctattaaaatataaaagagttcaataggaagagaaatgaatggatgtttgccttttcaaagagggtgggtttgtaaatgccaggaaatccagtttcctttagggattattcacgggcctcaccatcttctcttctcaaggcatttaaataacaggatccactttaataaaaaatgtcaaactcctcccgccttcactagcagccagaaaagcacgcgtatggtccatactatacaatttagccacgaatgacacctgctttgctttgttttctattgtgttaggcgtcagcctcgtgtgctcagatagatcttaagctccttgaaggcaagaaagaacccggtcccagactgcgtccgacacacagaatgctcgtaggaagcacaggctgatttatggaaaatacagcaagggtcttcaatttcgaactacagctccgccttggagatgctttccgcagcccgcgggccgcccacggggggcactgtctagctcccctcgcccctcagccgctctccgtcggtgctgttccccgctgcggccgggaggaggcgccacggactcgggctaagcttcttcccccttccgtcccccttccatccaccttaccaccccacttccccagcacatgacgtgggaagctgcctccgccagagtcttagcaagaggagtgagggggtgcaggggcttgggggtggggtggggtggggggtgtggagaaagaggacacgcgcgctcacacccgcccctgggagcagaagcagtatcttccccagcttcgtgggtttctcctccccccggagtcagggtgtgcgaggtagggggtgtgtgtgtgtctgtgtgtgtgtgcgcggcacgtttttgagtgtgagacccaaatccagaccaggcaacctgcgttccccgcgcctccccccgtccccggtgattaatacccatttttctgacgctcccctcctcccctcctgctctccctctccggctgccgcgcggttgacttgcacagcctgcccccgcccgcttcccttcccccggctccgatcctcaccaactggaatctgggctcctgcctctccaccccccacctctttttgagaaaggaaggttccccccaccccctttcaaaaaccacttcctccggcttcttcacctctaggaaatctcggggcttcgctctatcgagagtgctcgtcaagggtgattcttgatcaccaccatccagtagtgctggcgtccgaatgcatatccttttgccttgcaaagaagagtcatgaacttcaaaacccccgagacggatcattaatcctgctttgcaggaaaggaaaaccctccattcccagccaccggccacccctctccgcagactgcaaccgcggaggcgctcggagccggtacgtaaagatgggctttggagtctctcctttgaatgtaggggtttgggggtgtcaggcagataaagggtcgaagccgtgaaatcgtgaacgaatctggcatgaggtaaagctctgaaatccagcagaacccggcacttgctaatttggacgtggcttttttaaaggttttttttttttgtgggggagggggtgctgtgactgggtagggctgtctctggtcttttggggggtttcatcccttcacctagcagaggggcagggcagcggcgccccgggccggacccacgcgccgagcccatccgtccaatcgacacgttgcaggtgaagccccgtgcgctgcacctcagcgcggcggcagcgtgagtgtgcgcgggggtgagtgtgcgcgggggtgagtgtgagtgcgcgcggggcgcgtgcgcgtcgggggcgtgtgtgcgcgcgtcagtgtgccccttccaagaaatgcccagtgtgcaccccgtgcacaatcagaacccattcagcacaagcccggggtgggaggcggcgctgctgctggaggcgatggggagagcgagcgagacaagtcagcagcaatgcagatggggctgggggccgcactcgctggcgagttaagtgggaattgtgtttctgcgtgtgtgtgagtgtgtgttgctgtatggtgccgcttctcccccccttcctccttccttcccacttccctccttcgctcgctccctccctctctcctcttccattcaggttggctttcccacctctcatccgtgcctgtcccaggaatggtatagccagaccttttctgaattatttatagaccggtaccagctgttttcaattcctctcgtgtgcactctgtgggaaatgcggggtttcctcccccctttccttaaaacgaattgatatctttttcggaatgcatttttctcaccctccgggggacacgcgaatcaagccctgaccgcctctttttcccccttaggaaggggacgctttgggaatgaccatgctccaccgagggacggagccggcccccagcttctccacacagagcctcctccactaacgctccaaaaaccaaaaaccgtaattgccagaagaagcgttaaaaatctattccagccactaacctcacatgcacacggaataattactctggattctgcattgtgagctgctctccataccctgaattacctttgaattaaatctttttttttttgaatttgcatctcttcaagacacaagattaaaacaaaatttacgctaaattggattttaaattatcttccgttcatttatccttcgtctttcttatgtggatatgcaagcgagaagaagggactggacattcccaacatgctcactcccttaatctgtccgtctagaggtttggcttctacaaaccaaggtagggcaaattctattttattttttcctcacctggggtagggattcctcattttatctatctcttcgagtccctcaagtggatctttttggaagaaaaggtcacaagatatgaaaataatgctgttttgggaaaaaaggcttattacaaagaaggaaatctcccatgttttttctttttcttctctcatctaacaggttttgggcttttggggggcagtgggggtggatgtatgcaggcacaaaagatgttggatggcatcaggggaatgtatctatatctatagacatagccagccaggagacctgtgtgattttccagttaaatagcattttattcacccagaactaaagctccgatttttatgggaatctagaaatcctttttttttttttttttcaggttggctttattccccttgtcaccttcatgcctctctccctgtctcctgtctttacctttctaggcatcctttctatgccctttaaaacagataaaaataatgattgagattactgtgattgttgccctgaaatccacttgctgtctaaagggttgacaaggggcccagagatcccgggaggcctattgcagaggggtaggtctaggtggggatcgggctggtctcagaacacctggaattgaaggatgctgcaggttaaacgacttaaatcttaagctcggaaaggaggaattctgtcaatattctgcttttaatttgtattttttcctgtgctattatttttgagctgtaaatttctccttctgtctacatatctatttatacccacacatcctccaagcaaactgttacttctacactcttgcaaaatggctatcttgcagagttctaaaatgctgtgcatgtggaaggggtgcagaattcgacacgtgagtctttgtgttaaacaaagagatgtgctgtttgcatgtattagtcttgtaccctcaaaaatggaattaatactttaacattttccctttcatcaatttttacaatatgtgaaatgtgattaggcagtattttaatgtacttgagaagagaaatagcaggagaaatggaaaagacttagctaatgactcttcagctagtcactcatgcaatccaagacaactcttgagagaatcagatcattcatgggttggagggccatgatggtgagtgggctgctcctttccttgctccactgaccatatgtccctgaactctgaaggcgtctaaatgcagggatcaggttgggataaagatctccaaaaacatgtagcagaatcattagcatcattatttttcctaaaagtattaccaccaccccaacacacacacaatttttttttctggcattttaaaacaacaattctttgataatccaaaataccaaagggatgtggggaagaggtgaaagatctttgtcgctcaacatgacagtagatgatagttcttcattgtccagaaaggatagatgtaatccaaattcactatcccccttctctaggtttcattcttttgagttttactgctgaaatgctactttgtaaccatggtgtaatcagagtgagagggtgggatcccactttgaaccatgttctcaccacgtctacaaatgactgaggttatctggtgtgtgctcaccttagagacacctgaactcattctccatctgcttccactccaagtaggaggatgaactcttaatttgacttcaaaatagaaaagaggtatgggtgagaaaggcagctccatgtgcaatgctttcatacatacagatggacaaggagaggagggcattgatggggcacagggccccttttgcatccccagtgccacaacaccagtactctacacccagtaggtcctttggaatgttcgtttgttggtgatgggtttgacaaggatgctgtttgacaggatctcagctacctcatttatcttgaatgccaatggatgaagccaggttccaggctatcattagttgtccctaagactaggcgaggttgaaaggggagggagttgaggaagagaggaaaaagtgggtggggaagctataaagggaaaggagaggtaatccaactggaagaggcttgttaagattcaaggaggaatcgccacaggtggtctgtgccttttcaccatgcaaagccattttggagaccctgatgaggaagcaggtgttccccatcctcgcaggcagtctctgtgaggctgtgactcagtggtgctctgagccatctcagggcctttgttctcgccccctttttccccctcacagcacagagctgactgggttctattttgtcttttctccttctgccagcccccttacaatgtgggtgacatgggaaagaaaggtggcggctggtgggaggaagagcaaatttaatttcaatcgaggaacctccatgatgtgcaattaagaaaagtaataataatgggaaataaagacttcccaggacacagttaaggacattaggtgggtgatttcaagagaagcagaacaacatggttatcttctatgtctgtttcaggtgtggcagagcatggcggatctgtgaacacagagtgatgtggcagtttagagttaggtgttacatgtgaggagaggagccgggagtaccactggattgtctaatttttcctctcccgttggttccatccctaggaagcctgtctgtctgaagatccatgctttgctaatgtatatatgcaatttttgccagggatggacgcaggcagagagaatcaataagaaggtgaaatgacaggaaaggaggggaaagagaaaaaatcctcaattcaatactttgcacaccaagtgcttttctttaaggctgattgagaagagcgacttcctctggagaagggatgaacagcaggaaccttgattttgtgttcttggtttacctccagaaagatagctttggaatcttgactgtcttccctgaccttcatgtacattcacccagtcttgtgtggggagaggcagggggcacctgggaggtgggcaaatggactgaaattggctggtggaatgaggggtgtttgggagaaacaggactgagctgatgcatcccttggccacaatattaccttgtaaaacattcttccagttcctccatgaatacaataaaccctgggggcaggattttttttttctatattcttgtttaagaatctgaaaacaaaggtgacatatatactactaacaggttaaagtaaaaaaattgttaatatttatgggctataaataatattgatggactataaaaggagacaggtgaaaggacaaattgtatgggaagaaatcataatcccaaatcagcatgtagaagctagggaagagaaaaaagccagggttgaactcaccattctaaagatgggaaaactgttgttccaaacgatagtcttgtgtctttaatattgaagactggggccgacaaaaccactcatcttgtgtattttgttggagtcaaaagtagctgagctggaaaaatgaagctcctctttttcctcagtgccattctaccccatccttaggaattctagaaatttcttcctttcagtaaactacattttcagtcgctgctcctgtgcacatgattggatgccagtattgtctctcattgtaaataaatatagatcaaaagagttactggtctaatgaattgttcgcatttattaaagtgcatctactctttgcaaccacaagaggaagtctccagggagagtagattagtggttgaattgatatcttccagaaggaggccaaagctagaacagaatgtagtcgggatgaaagagcaggcatagctcagagaaggtgggtttttgaggttcacctgcggctgttaatggtgcctgcggccattacacagaatccattgtgctgtgaacattttgggggattgtgaacccagcaaggtgtgtttatgaacctttagttgttttcttgatgttctccaccttatttttggtcttttcacttcctagtactttcagcagaggttggcagagaagggacctcatgcacgtctaccttgtccccttggtgaaactctccatggctgccccaggctgtggaattgccttcctttctggtcttcaccagcatgtgctcatgcttcttagtttatcctgactttgtttatatgccctgtttccctaagaagtttgtgcactcctcaagggcagggagagatgttttattcatcttagaatcatttgtacttagcgtagtgactagcacataatagattatcagaaaatgttaaataaatgaacagagaaaggaagtgagatattaattagttgatgatgctacctgtttgttctgttgggtttaggaagggttaaaattttgttgttagatgagatcaagaatatcagagctatgtgatactttagaaagcatctactctgaacttctcatttaataaagaaattgagatccagggacattaagtgattttcctaaggttgtataacttctttagcaccagtgctttgtacaccatgccattgattagagtgaaatgcagagttatctgtggattttaaatatctacgtcagtgctgctctaactttatcgtatattaaaatcatctggagattttgtgagactgcatattctaattcagtaaacctgggctggggctccacattttgcatttctaatgagctatcagttgacgccagagttgctggaccacgcttcacaggtctacaccatccctgcttttaattacagaccatggttagtggccttggcaccagaacattggcagttgtgcttgtattctacttttgggattccagcacttctttttttgttttgttttttaaatcagaaagaaacctgtatatttaagttcacccatctcctctcttctttcactctttccacctatgcacatcttttgcctgctctcttttcattctgtgctctcttattctgatgcttctcataactgattcctctctttcttttttttcttcttatgtcctcctgctttttagtttatctttttgttaatgtctcttagtctcttttacactgttcttttaacttcatttattttcatgtcttttgctttgttcaattattcaacaacatttaagaatattgtgctatgaaaaagagttagctctgtctgtacctgccaggatctagtggtgtggagcaggatctagtggtgtagcccaggatctagtggtgtggacatgtataaagagataattatatatttaggtaagatctaaaaaggagagaaatctgggagagtgaggagggcttcatggaggggttgacatttaaattatgtcttgaggaaaaaataggagatttataggatacagaaagacaggtcattttaggaggacagaaagcatatgaagaggaaagttggtgtaaaaggcaagcctcccgctcttccttgcatcccttaactcaaggaaaagaacaacacaggaatttgctgcttctttgattaggaatttcagattacaaatgacaaggttagagaataaagccagggtcgtcttaaaagaaggaagaggctctaatttctgctttcatgattgtatagttagtgaaatcctagccttgtttattagacttgcctctagaatgagcaaatgatacagttttcatcttagaccactggattgcagctaactctgttgatggccattacaaagaaagggacagctgttagttggtttgtgtccaaagggaaacctggatcctagcccaggccaagctactcagaatgaaggaccagcctagcccatgtgtttctggagtagggaggtaaaaagttgccatgcccttcagacaccagctgctttctgtaatggcaaagggagtgatggatgaagagggatcccattattcctaggggattcacaaaatgctttttggtagtctatttagagtggcttgatattttagaggtttttactcctggggatgtccaggtgtggagatgctggggagacaccttcagtcacctcttgattaaactatagcattggtgcctaagggaagatgggcttgaaatggatgattccctaaatttattttctatctttttctgctccttatccttttaccatttatctacactttcaccattctttgtatgttgtggtttgtatttgtttcattagcagaagaaacctaagctcagcctgatgacttattaaagatgcattacatataaagagagtaccctggatctgaagatatgtgggtgagtaaattcccaccattgactgacctaagagtcaggcattccaaggggacttgagaggcagagcaggggaggcacagtgatgaggctgtgcccagggtccctgagaaggcggtggaggggaagcagggccagctctctgtgaatggcagacctggaaggagagagaagctacaggctttggccctccttggagcccagcttgatggggagcgtaaagtctgtagtagaggagcttcctagattaagacaattaaagtttcaatgaattaaccctctgaactgctcactcaactcaccaacggcaaactatgctgtctacacgccatcctctgtgtctttcctcactgcctcactcagactgaaaatttctttctttagaaagaaatgtcaagcttaaagttcccattaatctttatatagacccactcagggcttcaaccacatagaatttcttaggaaatcagatcttgtttctttttaagaggggggacttaaaaacaatggctgaataaaagcactacatggttacaggaagggagaagagagtctcagaagcctgaagctcaggtgaggacgctcattctttttcccatagctaattgttctctgtgaaaatggccgacattcttaactaatcctcccaccttctaggggccgtagtctggtcacacagatgccatagcagtttgtactttggattcgagattagtgtattggatatgtatccaaatccacacaccccccacacacctgtgcatattagacttgtgtgtggatggatatgtttgtgcagtgacttacctaccaaatatagtaggccccaaaatcttaaatgcattaaatgtgtgcaatttagggacaataatgcatgtggtctctgtgtgtggcacaggataatagaacaataatgctgacagtcaccttggaggttacgtgtcctcctcgacaaccaccctttaaaaactgtgaaaatagtcctaaggttggccatgtggcctaaagccacataatgtggtcagccacgtccactgaccctcatttcagtactttcctttcccgtgccctgcccccaagagcccccttggaatgcatggccctaaatcagccagtggtgtgcatttgctcatctacatagcatcagagtccggagttctctcttatatgtaatgggtctttaaaaatgttaggtttttccaggctgtccagtagctgcctatatgataatgaaagaggtggtggtcttaggaggtggtggtcttaggagtcagaagcttatatttaattctgcttgtgttgctttattctgtgaccatgtacaaaccgttgactctggacctcaattttctaatttccataaagtgacaatagtctgaagcagtgattttgaactccacttcaataacaaaatcatccacagagcttaaacaaaaacaaatacaaaaaactaaacaagaataacaacaaagaaaagaatgatgcccatgctcagaccctaccccaaagagttaaattgaaatctctcagggagggattcaggcgatggtcatttaaaaaacttccctgcaggattctaatgcgaagccatatttgagaatgactgggcaagatgattgacaaggcacctgttagctctaaacattatgttacactagcattttaacatgaaggtaagaccttgtcactgttaaactgttctatgattagtggagggtccctgggccagaagttaaaaaaaaatgctgttgggatatgacggtacttagtctacagcttgcacccaaggggtggaactggggtttgaattaagggaagctctctcaacactaacactggcctggtgttgaaagttaggaaacttagggagaatgctttcctgacgcccttaaaacaggtgtggctgcaaaatagggcgagcagttcttggttttgcaaacatcctctgttccacttagtctttattgagggtgccccatttcttgtttcggagaaaaaacctcatttcggtcctttgtaacagtgtaaatgtaggaaaactattaataaatggggctggctaagcagaccttgattgattggtgaggggtgtgaatggtgcaattatctgagtgctagttggaattcactagccctgttgccctccctctcagtgcctgaagtagaatattaaaggcacgcagaggaggaagagggtaggaggcatcaagatgtcgttcttctctgactgtaactttaatcactgattattaggctggctgggttaatagttttctcacatccttcctttttggcttactctcttccctgttttaaaataaatgtgaacctaaatgtacagaggcaagaaaaaacccagatttatgaatccgtgtctttaaaaagacaaactataaaagaataaaaacactacttctcttttggacagctgctaatagccattgaagataaaagagaaagggtatgagtgtggtttggactctggtgtttggtgggctgtgtggtggtgtgaggcactaaatatttaggagaaaactaagacgcatactcctcgatttgaatttttcaaatatctactggctggccccacacaggcaaaacatccaaatcatggagctactgcagcctttaccctggaatttgttaccatgcagatagatcagtttcacccgtgagctctgtggagccacaattgctgtctttgtgattcgtggttcttcctctcatcaccttgttagaggctccagaattgtttctgagcttgagggggaatggagaatatttcagtttttatttgattttgtttacatctgtatcctggtttttccttcagttcacataggaagaaggactgcagaagaaattctaccctggccaaatacaggtgctcagatttgaaagatctttcctgagtaggagaatgctaccctttggatttttgaagaaagaaatactggatgtgtgtgtgtgtgtgtgtgtgtgtgtgtgtgtgtgtgtttagagcctgcatgtagaagagaaatcacttttgtttaaaagtgatcaaatttgttaaagtgatcaaatttattaattttttattttcctgtgaggacaagatttatgactttgtccttttatgtcctcagtggttagcagagtgctctctgcacatggtcagtgctcagaaaatattggttgttggtaaagatgatgatggaaatgaacgtgcattgaagataaagctgacatgtttataccttttatgtttctatttccttgccatccaagcacctcttaatgctttgggtgagatttactagagtggaacagacgaaagtatctttagtgccagctttaggctgatgaagtgaaaatatactcattccttagtgcctcagttctttgagcttcctttcacattgtgttcgatatggacatttcttcaaaaagctctctctcatcactaattatgctattgcccttcctttcaaattccatgtaaatactgttcattcctcaaggctcatctcaaaggcaggctccaccatgaggtcttgcttgatctccccaactagaagtgaactctcccttgggaggccgaggcaggtggatcaagaggtcaggagttcgagaccagcctggccaaagtggtgaaaccccatctctactaaaaatacaaaaattagctgggcacggtggcagttgcctataatcccagctactcaggaggctgaggcaggagaattgcttgaatctgggaggcagaggttgcagtgagctgagattgcaccactgcactccagcctggactgtctggaataaatgggatcatggttaccttctcaacctctcctttttattatgtacccatttacaaagctgctttgatttcaacataaaattcaagtttgacactgaaactcataaatgatctttcagtaaccattgcaggcaatctagtttattgataagtctgcatttacgcaactgagacagagattaggaaaaggagtgagaaggtcctggaattatgtaatcagaatttgtatatcctttaaagacaagaagtggaatgaaaatgctaagaattattgctgtcagtctaaatatagttatctatgaggaattgccttgcctttgctggagacaaatttctatggaaaattatattctagattatgccaattatcttctagattatattaatgcacattactcaatcctcaccacaaggctgacattatttctgtttctcagataaactgaggagtagagagctgaatgttacacagctataaggagcaaactagggttccaacttacatcttctgattctaagccctgactctttaaattatatagagttgcttccatgttaaaaaagataaaggtttatgttgcatgtggggaactcataaacagcctgtacttggaaacttcagctaaagtgattttcttctagatcccttctcttggggctttgctgttggtaaaaggcaaagttgttttaaactgaaaaaatggatccctacaaaatagttgatttctggaccttaatttaattcagtgaggatgaaggatgagaaactcatggtactggccataagcatctcattcatttcacatatggctaaggcctgagtatcatcatcttagcctacccctaccattctgtaaatatatttcaactctgaacctgaagactctggttcctctaagagggaaggaacaatctacttctctctgatcatgtaatcttggacattttgaagattctccattttcttgcatctatttctttctcaaacccatttgcaaactactcctttgaatagagactaatggttaagtgcaagagaatggcagtcctaagtatggctttgtgcttggattttactattaacaggggtcatcattgttaaagaggaaattccaaaaaggacgtgagtgagctagttttgtttcaaatatctctatcagctattaactcagagggcagttttatagaaaataaatataaaatacaaaggttaaattccccatatcttttctttctattatgaaagaggatatatattggtgccacatggagtgccttaactttaccacatgcatattttaaaaaggcctttcagtaatttgaagcaaggtggaattgaggagagaggcactggtctttggccctgttgagcagatcccatcttggccccaccctggccagcactgtgtgactcaggcaaactatacaaccttgctgaactcacttcctcatctgtaaaatgaggtctttaggggagccagttatcgtgttgacccctgtaaagatgtcgttttgtggactgaatgaggaaatgtaaaaaatctcctcaaccataagcgtaatatacacatgggctatatgaaataataattaataactgcatcctgctccaaatagccagttttcaatgtatgatgtggccttgaattcaatgcatccactctcagtgaacaagaaaatggaaaatatttaatgggcaagacatgccgtgagtggcaaggtacgcagcattctgaatgcagagtggcacctagacattgtgacctgcagtttttaatctttggtctatgtctccttcccaggttctctttcacagtattttattgagaaaactagataaatacttgtcagaaaggagagcaaaactaatctttctagctttatgtgtgaaactgttttttccaggcttatcttttatctttacatgatccaagaagtaaagagatggagatggtgacacaggcaggggcaagggatactgtgaaaggctgatttacactccaggcctttgctcatgcctcttgctctgactgcagtgccctccccacctcccctcatgcctgcaagtttcagctcagggatcctcagctccaggtcttcctgtcgcccacagactggaatcactggcctcttcctgctcccatagcccaccctgggatgtgaaaggactgctatcgtgtctctatccatcccacctcccgatgtgaatttctcaaggggagaaacagcatccaccctcatgtcctggtgtgtgcctaacagaatgctggcacaccatagatgtttaatggatggctgctactttgttgtgagcacctacaggttctgtgcttagtgctttccatgaattgaccaatttaaccctttcaaacatccatagaggtatgtaaatttatctgcatttcacagatgaggatactaagacatgaagacattaaaagcttgctttgcttaaatggcacaaccaggatttgaactgggcgttttggctcaagttcacactcttaaactctttgctctaagctttgtagtaaatgtttatggttgacttgatgctcagagacttaaaagaaacatactgtgtgtctggttctacataatgaagagagtggagaaagagaagggtgcacagcaggattcgaaaggtggttaggacctggacttctgtgaatgatttgtggacctctttcttctgatgtgctcattagctataggacacagccaagacagtcttccagaaatgcacaggagtgtaattaatgtaattgttgagttatgcagaaggtgaaatgagttgtattttcagcacttgtacttcctcagctccttgctgtcatcttgggttttttacattttccctgctactgtcttctccacctttctttctgcagtgtaacatggtggcagaggcagaaaatggtggtttttctcctgagcaagaactcaggagtcatagtgccagggtttatgttctgacccttgttcatttattgggaaaatgtctttatttctctgtactatcagattccttatccatcaaatggagtattaataattctgggtttttagagttactgtgagaatcaggtgagttatttcactttcaacaatacttgtcacagagtaggcattgtataaatattaattatcgtgacttcccctgtttccaacccactaggtattcgatcagagctagtttgggtggtgcagtgtgatgcttagttgtcccatgtagagggccagcagtcatttctgaattagaagcttccagatcaagtctgacttctttgagtatctcatcaaattacatctggcaagaaaagacaatctggccacgaggtgccatgtttctagaatatttagagaacatgaatttttagtacaaaaatgcagaagatacaaatggaaaccaattaattgaggatttaaagtttcaagtgagcctaggacaaagtcaccatgaactgatcacacatgaaaaactgtaaggaaaactaaaacaagccaaaacttgagaaagaaaaggaaggttttcaatgaaggaagacaacggaggcaaagacaaaccaaattggatgtaataatattgatcacttacatttctaaagcttgatagtgtgtcaatagctttctcatatatactgtcttcctcatacattatttggtcttcccaagaactcaccaggaggaattctgggcatgaactattaaccctattttaaaggtgaggaaattgaggtacaaagtactctagtgatataaagtgctctaatgattgcccaaaattatgccgtcaagaggaagaaaaacctagaattcaagcccagcttttctgaatctcatgtccggggctctttctcctctgcaggtgccttgagatagtttaggagatcagcttgctctcctagatgagaaagtctggagggatcctgctcggataaacaaaggtcttattctaaaaagaaagccacttcagtgggaaggtaggcatcttcagaaatggtaaaagttgtgaaatctgagaagaaagattgacatatcatgcaaaagatttaagactttaggagcgatgcaattattaccattttacctctctatctttactttccaaaatttccacaataaagcatatcatttttatatttagaaaagatgattaggaaataaaaaatgaaaaactttagttatatgagaaattaaagggaaagcagtaaaagccatcttcataagaacaagaagtatatctttaatttcttagaaatataattgggaactggtaactaacatacaatcacacacacgtgtgtgtgtgtgtgtgtgtgtggtgtgtaatctggattctagcatgagttagggaacacaagaccaacataaaattggagaggattttaaaacattaattaaggagaatatgataaataaccccaggtcttcatgacagattctaaaatgtctttaacaaagaagtggccagtgcagggccaaaggctgccatttgggaaaatcacagaggactggaaagatctctgagagccagtgtataaccttctttgaaaaaagagatgatggctagaaattacaaactcataagcataaatactaggttgcaaaaaatatcaaacctttcagttaccttaaagagaccagggctaggaaccctcaaaatgactttttaaagaacaaatcctattagatctggggctctgtgaggatttcaggcttggcaggctgcaggaactgatatatgtaattaaggaaaagtaagaaaagtttaagatctggcttatcctgagattctactttctaaacagggaaaatggggtgggttaaatagatggtggtcaaaatggagtgacggcagtggctgccagctagggcaatgccaaagatgctatgtggttctcacctgggggagcttggacccaacctatattaacattctcaacaaaggtgggaacagttaagtattgtgcctgcttctcaggtctgaacaaagaaggctgagctcctgctgaggaatgaggtgttctgcgagtcagctttgcaccgctgccgtcacaaacagcctggcttacagcctgtgaagtccatgctgccctccttgacccccaaacccgcttcatctttgctgccttcccacttctaccctgacctttattccacacattgaagcagcaattcccaaaatgaatgttctggatcctcttccctgaaaaatctacttttgtgccaatgcctcaaattccacatgaagtatttattaggggacttagcatccctgaagcccatctatgaatggcaggttaagagcccttgctctggactatgtgtccagggcacaccctggcaaatattcctctggttacttgtctctagaaggtgaagactttggagaacagcttttccttgcaatcctgacttttttgtctttcaagtttaacccaccgcatggattcatttataggatgtttatgaaggtttgtggccaagggcagggcctctttgctgtggaatcaaatttaatgcctatcctccaagagctcacacaaaccaggagctgagatttgggcaaaaatgtctagagaagaaggcagaattgatggtgtctttaaggtggcagaaatcaagtaatgtaggagcccagctatctggcccagacacgggtgagccaacgtgaccgcccagggataggggatgcaagtacttaggaagggatgaatgtgattcagataatattggaatagaggaatactagctttctttataattgtctactatgttagccacctcccagtccaccctaatggactctgactcttgtctaaggccctgagaacaaattctagccacagccagagattaagtctccatcaggaccccagggtgaagatttcttaaaatttctcgtaaggttctcctcccctctcaaagttgatattcagtggattctctctttacctttcccaccatgggagatttgtctctattttgtcctgggtgccaagcagtgccttacaaggacagctgagtcctggcaccctcaggatcctgggctggtactgctgtggcttttacaccaaggcaagcctagatcttgaatattcaacatctagaagtaaagatgggagccctagtgccactccccagagaggcagcccatgggagtcaaaagctgggtctttgatgtcaaagggacttgagttcagaatcctggaattgccaccgagtgactttgggtagggcatttcaacttttgactgccagcttttcctctgctgtaaaacgcaggttatgtgaaggttagatgaggtgaagtatgtaaagcgcctggaactgagctctctgcctctcttgtccatatcctgtgagtaacgctgccgatttctcagtacggtaggaaaaagcaaaagggatggtccttgctggccttctccatcttcttttgtttttcttacataaatgcctaccccagcctgtgcctcaacgaccctccactacagctgtcatgccgcggagaattgcagaagctgggtgcgttcatttctgctgatgagggagatggagtaaagtgtatgaaaccgagtgcctaggagagcctcaggaaattgggagtgttacagaataagcccagaaattaggtgtgtccaagggggcgatccagagagacctgggggctgggagcctcgggttattagagagaatggcaggagcaaggaaagagggaaattttttaaaaagagagggtgacactgatgaaaaagaagaaagtgccatagccaggacctgaacttccatcagcttctctgctttttctccacctgtgtgttaaggagggaaaaactagggagggagagaataaaggaagaggaaggatgagaaaaacagggtaaaaggaagaggtggcgggtgaggggctgaaaggaggtctgccttctctgacagccagggggagacagagggtctgtctaactgcattccccagggagggacagtgcctatcacccttcctccttccttgcctagcggacgacgaggtggcagcaattttggcactcttctgggggagaatcagaaagcgacagctgctctgcccccctgggaagttctgtctggactccagggagtttttgtgacttctttgtggaggtcagcccgcccgcccgcctgccagcctccaaggcttgcttgggtgttacggtcactgtgataatccagtcctctgccgggcagatatttgcttggtgtacatctctttgtctcactcctgcctgtaaatggtggcaaacagacattttggaaaggaattaagcattgtgagttcacagaatgtcaagcattcaagtggcaaatataaatcaatttcaaattgtttctggttttaggttatttgtagtacggtgcctacttgtagcataggcaattcagggttacttttatacaaaacgaatgcaattttctaaaatctgaattgaataactgcaggctggtggatatattgatctttgtgaagcccttctgtttccatgggagaagggatggtatatatttaaggcattgggtcttgatctcactttggtactggaatcaggggtgggcatgaagtagatgtggagacaagaagagcgtgagcctccctctgctcccgcctggttcctcggtgcagttgggttcaagcccagatgcagctggaagaagaagcagctgccaagcaaagccatgctccctgccgctcactgtgtggaagagccagcttcgtgcacgtgtgtgtgtgtgtgtgtgtgtgtgtgtgtgtatgtatgagagagacagaatctgagaatacaaatgaaaaaccatttcttcacagggtataagaactttagggtatattcataagggcactgattctgatttctgtcttagggaccagcatatttgaaatgctgctcaggtggttctaatgtacagccaagtctgagaattgctcttccagaccctcccaccacctctctcacacccgttcctttgtctcatatgtgcctgagccgtgctgcctgcaacctccactctaagggaggaagacagcctctgacttcttgggactccagtgattcttgtctgccattccgctggacctacgtttctagaagatgtggtgggttgattaaataaatgctctcaaccctctaattttatgcacacagctcctcatgctgtggaaataactactcttagatttttcattgtaagtggattgcccagattgcccagagggaaagaacttagtctaattttaataaaacaagtgtttatttagttattcagttaaaatggtcaacatttttgcactttgttacattttctcctacatatttcaaaatatacactaaattaacttttttaatatgttggatttatggattcttgcacatttccattgcagatcaaccacttaccggcaaaaatgtgccctccaattcttccacattgcctctttgtccaggtgtccagcagcatttcttccctatggtatctctctcacccctcccataagatctggatcctctctccttgtgacttcaggctttgcttcctccacttcacttacatcactgaccttacctctcagtgtggaattctctaatgcttccttctcctgggcttagaattccttgttgcttcccttccttccctcccctgccactctgtttcctcgaactggaattcagcttctccagtactgacccacccacttgcaggcatatctgcttttagtgttctgtcactcacactactaagggcagataaaaaaaaaaaaagtcgtcagaatcctttcttccagagcccatcatcacgaatgacggcatgaccagcctttgttcacaagcacccaccccactctcaaaacatgggctctctgagcattctctcctccatagtcctggtctcagttgatggtgtcatcacactttgctgagaaatcatcattctttgatgtaaaggtccataatcattctctttccagtataaacactcatgtctatcttttgtttgctggatgcttcagaggggactttgttttgttctttacagctacaactgcctttgtcctgacccaatccgtctcttcattacggactttgctgtcacacaatacttcctgtcttccctgacatcaggaagttctgttttctctgcttcttcactgctgctttcagtgtggtcaccctaaaacctttactgatccaaaacaaaattcattgtcttcccccagcccctctctctggggtccctgtttcttaggtagtatgagccttcttttagtgccttaggcctgatgctttggggtctcctccatgcccccagtaccctctccgcagtccccctgtggtgtcttcaaagtgcttttgcatatgaatcctcttgccacaaaaaggcagtagagccttttggtaaaaaaacatgggccttggagtcaaactgcctgaagctgccacgttttagtggtggaaactttgaaaaattacatcactcctgagtcttggtttccttatttgggaataatggagaataatagtaatacagtgattaaaaatatagttttgagaattaaatacattaatacctatagaggacttagaacagtacctggcatattataaatgtctaataaatatcaatattacctctaacccatgggtctctactgggggctgtttttcctctcaaaggacatttgccaatgtctgcagacagttttcattgtcatgagtggggagcaggggtagaggcctgggatgctgctcagcatcctaggatgcatgagacagcccttgaaaatgaagaatgaggcatcgcaaaatgtcagcattgctgaggctgaaaagctcggctccacttatgccaccattttctcaagcctcaatcaagcgtccattctgttttttctccgtcctccactcccttgaatgctcattttctcacctggtttcagttacaaactggttttgatcattctgcaatctacagttccatcatcctgaataataatatctccagtggtggatagaaaaatctctcctggcatgttctcccaatattggaaatggtgaagaccaaaaaaaaaaaaaaaagaaaaagaaaaaaagaaagaaacccactgttcctctcccttctcccttcattcaatcagcatctcttcgccaacacatttctatggttgccagtggcacactgtcctggcaccagtttccactggccccctctccaaaatcccccacttccactccatgccaatgtcagccggttctccctccgcatggtttccttggatcctcattttccatttccatggctactgcttagtgcaggactctagctggcatcccccgcctggacctcgcctcctctcctccaccctccacacagctgctggaattgtcttcattaaacactgttttctctactcaccaatccacggtggctctccattactgcttattagcaaaaggaaattccccaggaagccctctgcagcctgacctccctctccctgcgggccccaccctggcggctgcctgcctttgtgttactccctcccagtctctgggcgttcacctattggaactcctccctgtctgtctctacaccttagagtgttataattccccttcctggaaagcctccttctctccttttgccaaactctgtctgtcacctcctttaaaatctggctcaattttgaactcccctaagaaactttcctgaataacccaccagattctctgtgtcctattactccgtctctcattttggtcacaagtatttattagacttggcctacattaatttacacttgctgatgtgtatgaagaatcccttagtatttttagagaatatccaaatgtgtatgtttctttccccctccaccccctttttttttcttttaagctaattcccgcggtccaaatcaagtgctctggatagaggaggacttcaataaatgacgtctctataacgtcttttttcccctctctcaaagccaaggcgggacttcaagggcatattttatgggtgactttaaaataaccttctcgtctttttgtggttgtattggtagtgggtgggaagaagaggaggaggatgaggagtaggagaaggagaaagaggagaaggagaacatggaggaggaagagtggagggaggaggaggaagcaaatctgggcttgccaaacacaggcaacaaaatgcctccgtcagaggttgcccacgggatgagacatgtggtatgagaaaaaggtaccagtgccatgtcctgggcatctgctaatgagaacctccctagggaaaaaggagacagaaacatattgtgtactaacctatgggggtacacccagcttttgtttagcatttggcagcaagctggacacttttaagtatattttaaatctatgacctcatttggcaaatgagatagatgatgatgttccattatgcagctgaggaagtgaaggctagggcagctcatgtgacttgctcctgggcatcaggactgtgctggcgtttggactcagttcttgtgaattccggggtcccatgctttccattgaaccctgttgccttatcttactctgtaaggtaaagctttagtccacttcagtgccattatttttacagattgtgttgccattattagtccactattagtaaaactcagcctagaattaatcctaattagtgctcttttcactttatcacaaacactacattttattcctaatccaaggtgcaaatagacctcttcccaagagacttgagaccagcgctgtccaataaaactttctaccgtgacggaaatgttgtctaactttactgtccaatgtgatagccactagccacctgtgactagtgagaatggagaatttcagttaatttaagtgccaacagtcatatgcagcctgtggtttcctccttggacatgtcagctccagattcgttatgtccttatatttgtcagggttagtaatttgcctaatctgggttttcacatctcccttcccttttcatcctctgggaggttacagtaaaccacgaagattcagaatgtgggagctcacccaagatgggcctccgcagagcctgcatcgtcatcaagggaggcaagagagatgagggagccgactgctgtgctggggagtcggcactgggtgggaggcatttgtggaggagaaaccgccagctcctgggtgggtctcttcccttctagtagccttataggagctcagcactcgttcctgtgtggttctcgcctcttcccacaggagacaggtcatgggaggaagctgaactgcttctcagagattggggtggagggggctctaatatattatagcattagccttctccatctggcccagtggaaggttaccaatgagatgaagatgagttcattgggtgcttctgtctttaatttccacggagagatacctcagtagtgctttatggtagaagcctctctttgcagtcctctctctctctgtctcaagcttgtgtgtgtacccatacacatgtatatggtatacacaccaaatgccctaagtacctttcttcccatatcctgcattacatcaaaaatactagttactatatttactgaggccgacctcccaggagaggctcccaatggcagacttgttgcagctgagccgagtccagtggaagcaacagaaaatgacagatccccaagagaacagctaatggaagcaataggttgatggtatggcatggtgtggcctgaccctgtctttgctggtttctttctcttttcttgttcactattctgctccacttgaattttaatctaatttattttttatgcctataagaaaataacctgaactctctttaacctgtgggacatacagcattggaattctcgccctagataaattgagtctgtttatacacagaaattaagggtagaggacgaaaaagaactttccttagaaattcagagtctttaattgcaggactagagggaggatctgaactctgactctcttgagtctagagaaatcgtggaagaagttaacctcagagttaactgtttaagggacatggatgctattcatccacgtaaaaatgttccgtcgtgcgcttcattgccgtgaatatgtttacagggaaatggaagttttgttctgtggctcacgggcttactggtgagtccccagaagaccctccaggtatgctcgtgatgatgcggctcgttgctgggcagacagatgtgagcccacacagggcacccagagtccatacggaacgaacagttggaggaaacgacttggagaaaaaggcgcttgttttcacacagaggcttatagaacagaatgagggtaggagaattcagggcagctgtgacagagagaaagagttactgccctgataagagatttttgcaaaattttctctgaggaatgtagattttaagaacataactcaaattgccacgagttgtcatttaaatcagagatctaatcatatctgcctcctcggaagcctttaatggctcattattgcgtgcagaatgaagtccttgttttcctccgcagcgtgcctgggcgtccgtggttcatctctcacggcctttgtcgcctcctgcccactgcattgcttcctcctctttctgctccagctcattcgtgcacttagtgcacacttgacacacttagtgcccttgacacatttctttggctttgctcaggccgttcctgcctttggtcagacatatcccctactccatcccagcactgtcaaagttctgcaagtaagttcttcaaggtgtcgctgcaacctcacctcctctaggaagccttcccatatccttcaaacaggggacgcatttttctctcctgcattcttacgtatcactctgtattcgcaacagcccttgtcacccttgtcttatttgcaagttattaatatacgcgtctggtgccaccatgcagctggggccccctggagagccaggctgcatcttcttgatcttcacactgcacgtactctagaaaagtgcattgcatacagcaggcacattaaatgggatggctctttgtgtcttaattgaaaccactggctgcttacctttatctcttcatttgccttttctacttgttttgtagtttcaaagtattgtatgccatatataggcccaaaggtggaattgagttaagtgaagaagccggctccagtgtacatgatgaattctgctcatttcatctcaaaattatttggatgcataactgactttagctgagtagaataaggacattttgcttcagttagaaccggttcagctgtttcttgctccttgaaatcatcgaagtaaagttttgaatttgaatgcctcacaggttctaccctgttcaaatagagccaacataatgatttaggcaagattctatgtctgctgcagacgtgtggtgagtcttctgtcctttctgttaatctttcagcatctttgatattactttcagattttggttttggatttgcattttgccagcttgtgtttctgaatagtacttaggtttatctataggtcagatcctgctacaagaaatagcatgaaaatctctctgctaacaaggaatgctaggtctaaataaatatgtaacccatttgcctcaaataatatccaatcaaatagaatatttgaccttaaaatatgtggtcacatttgtttatagtttattataatattttatttacttcaaatatcttaaaagatgttttgttaaatgcatgatcaattttgtcaaatcttcttctcctggaatagaaaagagacaaaggatgggtacattggggaaggctcatttatgtgcctaaaaaagggcaaccacatgactttgtccctgtttctatcagttctataatgaaagcatttctctaaagctattccttgtgatggtataattggaggtctcagttgcacaatttttcttcccttttgcaacaaattatgttccttttgtgtcataagattttttttgtcccttcaaagaagaaaaagttttttttttttttttttcctgagacggagtctcactctgtcacccaggctagagtatagtggcaagatctcggctcacagcaacctccacctcccaggttcaagtgattctgcttcagcctccagagtagctgcgattacaggtgtgcaccatcgcacccaggtaatttttttatatttatggtagagatggtgtttcaccatgttggccaggctagccttgaactcctgacctcaagtgatccacccgcctcggcctcccaaagtgctgggattacagtactttcatatgaatgtcacccagtggttcccctgaacttggatgtgactcagtctgcagatggccagatttacttgtaagagcctgatgaccaatgctgtcttgcttttatctaaagctgaggaggtagaagtgctctgagctcccacattaaccggatgtgctggctccatctgtcccatttcaacctcaggtgaaatgtcaggggccagttgttgcagtggagatggctctagtatctctaacctggccagcaccctttgttgaatcatgtagcaaattacgtttgtttgtgctgagatattttttagtgctgaggtgagacgttcagaatcaatgccattgtgggttaggcccagacctagtaggcagattatatctgaaagatagaatcacagaatgttagcaccaaagaggacaactcattgtgtggctgaggacactaaggccgatgggctaagcaaataccaaagtacgtagctatgcctggtccagggccagaactcaggcagcctgactcccattccaaggttttgaaactatgtcaatagtctacatgcttttcaaatcccacattttgatgagtaaaacatttgggggtttttatccctagtctgtgtatattattattcagtgaagaaaacagcccatactaggtaattcaaaagggagaatttaatgctgggaatcagggacaaagggataagaagagctgaaagctaaatggggcatggccaaccccatgtgcaaccccagatcagcaaagcaggaagccagtgtgaacctttgggtcacagggaacaaggtagaacttgtccactgagaatggaacaagtggtggctgcctggcagagaatgtcagtcagggaggagatacagctcctgggaagatgctgaccaaagcagagagaaagggggagatatattgtagcttctcctctctccagcacccccaccatctcttggcagtatctccattggtaaatcctagccagaatctatttggcacgggaggcttggaaatgtggtctgcaaggtttttgctctctgcaataaagagcagtaaagagaagggatgggggacagatctcagagtgaataagcaaattggtgtagattattttccaaaggtaactacaacaatctctcccatcccacattctcctctgcaatgtgacctggtcattactgcacatcatggtgtggagggtccagccccctccccttgtatctgggcagcttcataattgcattgactaattgagtatgaagagcatggctctacgtgacttctgaggccaggtcagaaaaggccatgcagcgtctatctggttccctcggttcatttgtcctttggacatccctgctgccatgctgtgagaagccacacagacaggtcatgtgtaggtactctggtcagtggtcctggctgagcccaggtgtcagccatgtaagttgagaagtttcagatgattctagcatgcatccctggagtcacttcccagatgcttgggtcttctcaactgaggctccaaaagtcatggaaatgaatcaaacaatcacagctgtgccctacccaaactcctaaccctcagaatttgtgagcgtaatacactggttgttattttatgctaccaagttttggggtggtttgttatgcagccctacagaactggaatgccaatgaccagcatgtttatttagtacataattatatgtgtatactgtctaatatgttgtgttcattataaagcacgcaaaaaaacagaaattaaaagtgggtgagataaaaataaatataaatagaagttctaacattttattttcatgcccagctcctgggggattggaaacctcatgctattatataccttaaatacatggccagaagaagacagactttgatattcaggatcttttaaatagttttcaacaatctatgaaaaagaaagacgggggcaagtgatagagaggggaagtacagatagggaggttctcaccggaggaatgcaggaaggagagaggaaacacaggaggagaggttccatgggatagaacacagggctcctaaacagggtggagattttcctgaagcagtattaggctttcagagtattttagtttcatttctgtaatgccattcaggaggaccgttgctaactatatcctaatttgtggattcctgcggacactgtataaaggtgagtgggtaagatgagttacagtttcattaacacaacggggactgttattgagaactgattctagaatcgagtgcttcagagatctgaatatttttagaaagagaattgggttgagtcttttttctaatatctctcacttcctttacggaagctctaacacattccgtgtgggcacctgacatgcacatatagacacatccttaaggtccttatatacatttttatttttatatcaccatatacacgttgacttctttcttcacacccccaaccaaaaaaaaacccaataaaaatctttaataattttctctcttactgctatatatacacagatccacttttgatatatcaattgtgcttaggtataagacctgtacagataaatgtattaatctattgcaagcaattaataaggatagctttctttttctttctttttctcccctcttctctttcttattaccaataaagtctatttatccccttcttcctgtgaattcccttacagaagccacacaggttaaccagctatatagtatggtggccatttgctattagggctgtggtttcacagataaattagaccttgtctccactcttgagaagctcacagtctagagagagagatgaacagataaattggtaatcatattttgtgtggtgagtgctgtgatggaagcaaatacagtgtgtgtgggagcctgtggtatggacgctaagtgtccatgaagtcttcctagatttttgacaaatgggtgcaattatacagctctaccaaccatgaattgcatgtgcttggcttttggatgcagtaagctttctacaaacagactggatcatttgacttgaatatcctgttaacaagacaagctaatttgcccgaggggacttcttcacccttacatttaggctaaatggtttttacgttggattttcttattcaggctgcagggttcctatccttccctggaatgaatgctctctagcttgtctaccaggcagagactgctcagggatcactctgggttttttcagtgtttctatttcatttctggcctcagtcagtctgcatacaggaggttccctgtactatatctagggttgtcagatttagtgaattagaacactcaattaaatttgaatttcaaataaacaataattttttagtagaagtatgtttcaaatattgtaatatttgcatacttatactaaaagtatttgatatttatcattgaagttcaaattcaattgggtgtcctgtattttatctggcaggccatatcactactctctcttggccttgctcttcttggaatgttcacaagggagtgggaggtgtaagaaatttttatctctagaagcaccacttctggattggagattttgtccttcatttttctcttccctggtcaaacttagcttttttctatgttgtaggtggctaggcctgtcattccatgttgaatttatttctgatagggattctggaggtattaaaattctggcccttggttgaactgctttaccaaagtaatattttacctaaaacttatttttctccataagcttgaagtggaaactctttttaaggaattgtgcccaaagcatgagtcagaggcatgagagtaggctcagagagcaaagggcatttactgtcgtgcaggaatctgaggcatctcagcactccttttgtttatttcttcattgttcattgtgatctggcaaatgagaaacctaggccagtaatttttagataggcaaggagtcaaatataagaaacaataatagcaagaatttattgagcacatcctagcaagctaaatgcttttccatgtatgttctcacttaatcctcataataatttaatgagataagtactcttatcatccttattttccaaataaggaataaacttaaagagatgaaataacttgccttaggttgtgtagcccataagtgaccaaactgggatttgaaggcatgtaaatctgactacagagctcccacttacaaccccaatgctacagtcctttggggctgagcctgggctggggtctcagtaaacactcttgggttgattcatctactctgtttaaatgatttccaacaaggaagaatactttataacctcttttgtaacttctagtgtgtggtcccctattttgactggctattcttccatagattaatacgatgattttccctctgcgtataaaaccattccttagcctcagtagaaatagcaaattgatcaatatcttccccttaaagtggtaacttttctttttcctctggttgtctcttattttttcttcttaggttctgtaatcgacatcatgatcaaaggtaatttaagtgcctgttctataatgtttactactttttgttgctctcttttgagttcctccttaatgaatttagtatattttggagaatcacagtgcttacgtgcataaagttcataataaacataaatttgattggtttggttcttgcaggcttctgtactgcaaacacagtacagcctggtacatatctaaaagtgagtattttgctgattccctttaggctgtatccatctctgtctcatggcccatcaatatacactacattgaatgcaacttcttggcatcgtggtttgtgatcttcctctgtaatactagaacatgtatgtaaatgaaatcgtttgttaacgatgctatgtccaccacatggtacctgacaccctcctgtagaggctaatggcagtgtagatgttatattgatcatgaggccatagagtccctcacagttgaagcaccttatgtcggtggctttgagctgattgccgaatgccacggcagcttccacacttaaaggattccaggaggccctgtggtccctctggttgagtgttcagattaagggtcctggaaacctgtagcaaccctggagagaagaggcaggaagagggagaggaaagtttctgcctttgatctcagagggtctggaggatgtgggagggcctaggagttggaaagattggaaactctgtttgagacgtctctgtagcaaccagaatcttctgagatttctctaataactctcttacctagctgaggtttgcttgctgtccaggctgaaatgcaaaccagcatctcccttctcccctcatttctgtccaggaactatgggttcttcaggcagtggattcagccctgatttggatctctgggcactcttagggttgaagcaatggtccctccaaagtccggcaaccacacagataattctgctatcacctgctgcagggactaatagcctgcccctgctgaggacttgtgatacagggaaagtagtagaacctctgggaacactctcttaagactgctttccctcctttcccaagaacttagttctttcagagaaaaagcggtctgcagtagtctggtgagtttgtggttcctgggttttctgagtggctgcccatcagtttagagggaccacaatgccagtgactctaaatggcccatctgtccatggaattcccattagtcaccagttaccttccttacattccgggtgtcgcagcaccacaacttttgagtctttactcaaaagtaaatcaagacacaccatccttggcatgctgatgagattaatgtaacctacatttaggggaatttcagaaattttgtaattagaggtaccgttgctccttgcagaatccaggtctcttctcttcagaaatgtggcttttgagtgaatagtctttgttaagtcaccagtgttggctctgccaccaccaaccgtgttgaaatctttggcatcagagcagaaccggatgactctggcaaaaatgaatttgagaggatatatataaaaaaatctaagacccaaatctgtgagactgtgctttatctctagcaaagaaaaataggacttccttgctatttacagtgctctttcagcaaggaacacatctcagcatctttagtccccccagagggctaacaaaggtttgttgttctttcatcgcagcccatttttgaatttagcatttaaacatatggggcagggttggattgatccttatgaaaagaaagcatttaccccaaggatcccccctggcagagactttctttaggctttttctgtgaggcaatgtggttatatttgccccagaaccttctttcttgtagctattagacaacaagttgacattttgtatcatatttatgcatgtgctacttttagataccatcttatccttccccaatggcacttctacaattaactgcaacattgttgggttttgagtgagtaaataccatactttcagggcctaggtggccatatggtcacctttgccattgttttcttatggagaggtcctgaggagagtgaaagaacaatttcagtttaaaaatggggggctgcttctctggttctgggacaggacagtaaacccagagggtagtaggttaaagcctacagcgtggtttaacgttatggaagtgagttggagaacaactcatgcctcatcctcagctttgcactgtgtgtcagtgatggttgccatggtgatagcttcgtgtcatcactggaagatttggactgcagctggaaaatgagccacagccaaaggtggggtcctatcagatcaacagccacttttgatgctagggtttcaagttgaaaaggagaggatggaacagattattgaaaatctaagaatacatacaatgtagaacacccatggggatgttgaaacattctgttgcaggatgtggataggattgctactggatgtatgggaaaaccacgtatatgggcttgtgattgtctttttttccctttatgggccacatttctccagtgaggtgaagcgtgactgtctgagctatgttacaactgccctggcaaaggctggttcatgggttttgctgcttgctggaccaagctgctgactcatccctatgggaagataatgaggagaagaaagcaacatgcagcctacattgctataatccaaggacaattcacatggcgagcctcagttttttcctatcaatggtgttgtagacagtgaggggatacatacgtgcaacctcatggtttattagctacactgaccagtcagtgggaaaagcaacaggtctaaagtgtttgagaagttctgcaacacagcaacaaactggagaacagatacttttgtgagtacatgaagactttcaaagcagtatgaaggcatggatcattttaaaggacttaatgttcagattatcagtttcctactatagtctttcctaaaatccatctgctagagaaagtgtcacctctcctttcatggttgctcttttctctccttaccaaagaaaatcacacctctcacttacccaaattttactatatgcatcgctcaaaggtgaaaacacttctaagggtcacataaagggataattggaaatatttgtgttaggagaagcatcctttcatcaagaaccatagactatctctgtctccagcttattaaaagataacagtcctaataatacatttttatatattttaaactgtggtaaaatacacatattttaaactgtggtaaaatacacatatcataaaatgtaataagattttaccatttatgtttaatatttgtctgtcaaaattaatgtggttattttattttcaccaaatgtttacaaataattattgtaacactatctcaatccagaaaacaacacttaaacacctatgattacaggaaataaaaaataattataaactgaaacttttatatatatatattttggttgcaaagaagtataatagtgaccagtaaaatactttcaagcatcatgtatataatgtaacctatatattacattacaataaaattttgtgggggagatggaagaggaattcaatgtcagggaaaagaaggaatgatatcaaatgtataacttaaaaaaagggttaatcttacattttaaaaatggatggtggtagatataaagttactatggtctttatattccatggaataatttggaagagtggtgaagtaattttattttaaaatgttagtatttattatatgccagaaattatatactttgtaactatttagattatgatgaatgaaattaggtatcagcttaaaacaaatttttaagaatccttttagtgggtaactgagcaaacaagtttgaagacattatttaccccctccacacacagaatttacatatttatactaacttcaacactggactgtccttgtttcctcttttgacccatcaatattttcactcattatctctccatggggttgtctaacatcatactctggaatttcccacagagctgctacttctgttcccaaatgaggcttgttcttccattttcttgcattgttataatatgcactgttgttataatatgagcagtggcttggcatcctaggctgccctgtttggcatctgtagtcattccttggaattaaatgtagtaatagatggtttacttccaagtatgactgcatcagactctattgcctctgaaatcaatcaggtgaagaactagttgtttatgttcccatgtctcacagacttcagctggggttagactgacctgctttagtgactgcctttgtactgttgcttctgaagccaagagatcacccctcattgactcttaatacagcccatctcactgtaggatttgtacacacaggtaggtactggtgctgcccactgtgctctatgaaaaggctagctctggagaggaaacagtggaagtggtctatagaaaatctgctgccattgtattcacaggaacttatcactgttctgccaggtaagaccaaggttctcgtatcaacagcggtaggtagctcctaaataatctttctccaggatcacacaggcagagccagactcaagcagtaacaccctgcagtgtgacagggatctggagtgatacggaaaacaaagccttcagaaggaggtgtaggttagttaaaacattgtaacacctcataaaaatgcttaccaccctgccacttctcactctttctaatgtcataacaatgataccttcaatggattaagaatctggaacaagaagagtagcaggtgcttagttgcattttgctttgtgggcctgtgtgtttgctttgtgtttttcgtttttggcctgccacaatttgtttagaccctgaacttttagcccctatttatgattagtgtcaacttaggaacttctattgaaccactctattcttaaaaagcacatcaccctagaaaagtaatttatttttctagctgtagccatctgagaagtgatttatgataaacaactcatggtttactggaatcatacaaattaacttaaccaacagtccagaacttaaaaaattaaagccgtaagcatgtaagaaaatagataactgaatcaatggcccatagctctccctctcagctgggaacttccacatttcttctgtattctagattacctgtcatggtctgagacatatagtcaattgatgaaaaatacttgatttattaggtgaaagcctttatatttctatgttaaaactataagaaatgtttcttttttggactcaagtcagttatgggttcacgtccctgcccctaactaacttcatggccttgggcaagttgttgcacttttctgatgctcattttaattgtttgtaaaatgagaagtaggaagcctaccatgcagagttgggaggactagaggaagtagatgtaaaatacaaagatgctgaataactggagctgctgttaccatttttctcaaaggcatctcagtaagtgtctctctgtatgtggagctttgcaagaacctggctacagagcaagaggtggacagcaggccagccagctgggagaagcgtctcaagtagacgtacacacagctctgcttctgttgggaagctaccttggggcatggacaaggattctatctgtagcaacacataggagtcatttggtgatttagacttgtgtgaagtgttgtgaaatgttgggttgtatgactgagatagtggctttggaatattacctctcctcaacagtatgtggttaaagaagggttttaggaaatcatggaaggcacttataggaaggaaatggtggcagttcaaaacagggtgtttcagatttggagaatgatataagacctagacagaaatggatgaaattagataaattgggtaatgaataggcccatccatataaatttgagattgtcttttctagatttgttttacaaatgaaacttaaagtacccaaatctggatatattgataaagggatttatgctcatttatttattcattaattcagtagatacttattgagcgtctactatgtgccatgaactgttctagtgcctgggatacatcagtgagcaggcgagaccaggtcactgcctcctgaagctttcatcgtaatgggaaagacaataaacgaagagatgcaaatatgatcatagacgagagtgatgagtactgtgaataaaatggactataggtgaggggctagacagtgacggaaatttctgttttaggtagaggggccaggaaaggccttttggataaggtgacattgagcagagaggcataaatgaactgaagaggtaggaatgtagttctttgggatgagagcgtcccaggctgaggaaacaacaaatacaaagaccttggagtagaaatgtacatgtttgttaaagaaaaacaaggaggccatgcttagggcttagtgaatggagcagaagtgggagagatgagatcacggaggtagtcaagggccagttcacgtagggctttgaaggccatggcaaaagcttggattttattctaaattcaatgggggagtcaggggagaatcttgagtaggagtgtgacatcatctgacttcaggatcctttacataaacaaattattgtcaggaaaatagcaagcctgatgggttgattccatttcagatgtgaagttatgactcagacagccttgcatttgaatcctgactctatttcttaaggttttgtaactgggcaaaatgcttaaattttgtacacttctcctttttcatccttaaaatggtggagtaataagaagatccacctatggggctgttgtgaggattaagtgaacttttcctgaagtgctgttgcacaggcaggcacatctactgagaagtgcctgggggtgtgctcttatcagacgggagcagtggctgctctaaggctagaagtcaggtcccctaattccctgtggcatcccttgctccacccccaccccataccacctgctgctaaagagatgcttttctccatgaaccgggatgggagggcctctgagggaccagaggggtcaaggatgtgatcaaaatgccagccaagcaagataactccgacagtggctttcaggattttctgcaatttatcctcacagggagagatgataatgagattgtgctgtgtctctcccatatagtgctgtgtacccagcaggctctggataaatatttgttgaggatgagaatccttcaaagtgattattgtctctactgaaagatactgtattctaaactcccactaatttgaattattttaatttatatacattagtagtttgtatgaatgaagagttggaaataagtaacttacttgggaactttatagaaaatagatgattatctaacttaggcctattaggatatcattaattaatttgcctcattttattttacttgttcatatgtatcttctgttaaaatgttatttgtacagcaactaaaagtcgtgaaataattatttccaaatgaattgagttttcattaattttgagaagacattctagcccttaacatttggaatgaattacatttaattacattattcagttgtacaacttagcttcccaaatagtgcctgtgcctgaggctgaagtatagacatagtatgtagtgggatgaagattgtaggagggttttttctcagacccagaattgcctagaacagttgcagggcaataaacagaaaaagggggttcttgcttaaagagtagatcagctctgaagttctgggctgtcctccccacccctgtcatatcagctcttctggcaaatgatgctaatccctttcccacaattacttatgacccccgatgaagtctgtgatctcagaagcccttggttccaatggaaaaagtaacatggtggtggtcatggagagaggtttgcacgtggaagacggtaaaagcagaccttttttcaaaggcttgtaaaagagtggattaaagattaactgctatggggcacacaaacttgaacaagttgtgactcaaacatttgtaccgactttgaccttttgcccaggagagggcagtaacatgctaacatttaagcttttccagttgtccttagcagacactgcgctgcgggagccagcatagaattagtcacagttgggcctcattttcattctcacctgatcagctttcaatcttatgtttagttgttttcagccttcggctaccatggtttgcacacacgtagatctagaagtgacacttttcatttgtccttaggacgctaacagactggaaatctgcagtgatggtcccctgggtttgatgctgtgaatgctgcatgcctcggccaccacttccctgtgggtccagtttaagggcagtttatgccgatctacctcagccactgaggtggctgtcctgtccccaacttctctagactatcaagtcatgctccccacagtttatatcctccatcctaccccacagaattttacacctcagactcagaaacaaaaggtcacacccaatcccgttcctcacctggctttgaaatcagagcatcattgtgatttttttcttgtccctttgtccatcttcacagcaggagggtttggcaacctgcctcagccttatcatgcatatgactggagttgtcagcttttcttctgggacaactttctggctgcaaggtttgtggggagctgtgtgctagttacaggcatttttagcttttgaccaggttcaatgtgggaacataaaggagtatcaaaatactaaaaatagaaggcaatgaaatataagctaattctcaatatctagcagtactgttttggtcattcttggtaactggcccagctctatccaacggccacagagagtgtgaatcccctgtctacccaccctcctatctacctcctacctactgtgtgtgtgtgtgtgtgtgtgaacatatgtgtgtctgctttccctggggaagctagtggggcactagcataaataataatggttagtgaaagaaaatgtgggaaatgaagggaaattggagagagggttaatgtgaattggagccccaaagtccctgtaaggtgtgtggagagtcccctagtttcaatcatcatgttggaaggtgtgtggagagcatgggtgattgtggggtatatgtcagggtggggcagggagggagagagataatacagagatggaacactcatccgttacagaatggcttatttagcaaagtggttctaggattttagtgaaatgtaaatttcacccctgctccctttttttctaccagccaggccacctgttatttcccatggttgagtgtttaatgatttccagccatagggcttccctggcttctcctgggagcttgcttcacactctgttgagttgaaatgtttcttgatattcagcctacacttccctttgctcaatttcaccccattatctcctagttacaccccttgtattaccctcataaatcaatcttttctcccacttcgtcattttggtagtttggagacttatctgtttgcatgtgtacgtgtgtgtgcgtgtgtgtgtgtgtgcgccaaggagatgagttggaggacaaacggcaaggtaagaaataaaaaccgctggggaataatgccttcaggctgagctatgtggaattctttaaaggtgagaaggtttccttattctgcttttccataaatcataaagcagtctgaggtaaagcccatcaaaatggatctaagtaactgtaaattgtattgttttcccagatgctgtgggtgtaagtggcatcagggcactgaggggtgaatgggatggaacagactcaaaaggcaggccctattgcaaaatatttaagtcttggtttcacttataatggtgaaactgtaaatatctcagtggactggtaaaaattagcaatagaatctacagattgcaaactcttttctccacatattcataagcttgcaatacaaataccactggaccatggacctgcacttacaggtttacaggtcactgtggttacttcccagctcctgccttgatgccgtacctaatgcacaggcacactcaaccctttctagttttgtattctgtgtactttctgtgggctggatatgtttcttggattaaaaactgtatcagtccattttgtgttgttataaacgacctgagactgggtaatttataaagaaaatttggctcatggttctgcaggctgtacaagaagcattttaaccagcctgggcaacatggtgaaaccccacctctactaaaaatgatacaaaaattaactgggcatggtggtgtgcacccagctactcaggaggctgaactgggaggattacttgagcctaggaggaagaggttgcagtgagccaaaattgcactactgcactctagcctgggtgacagactaagaccttgtctcaaaaaggaaaaaaaaaaaaaaaaaaaaaagcacggtgcaggcatctgtctttctggtgagagcctcatgaaaccttcaatcatagtagaaggtgaaggggaaacaggcgtgttatgtggcaacagaaggagcaagggagagggaggggaggcatgccatgctcttttaaacaaccagatctcctgtgaaccacagcagggagaactcactcattacctggggaaaggcaccaaaccattcatgaaagattcagccccctgacccaaacacctcacatcaagccccacctccaacactggggatcacatttctatgagatttggaagggataaacatccaaaccatatcaagaatgtattttgtgtttttgaacttccctgatccacagcagaattttaaaaactagatttttatagataactaaacgctactgaagatcaacaaagttgattagtaacaataataatgatattggatggtaattcaaagactacattcagaatagacaaggagtagggaacagttaaagtctttcgaggtgagctcctattttgttctaattctccatttctcttttctttctttcctgaatgagcgtaagttgaagtttgatgtaatggcaaaaagagaagagaagcatttaattgtctttattttttaagaaattaaatcaactttattgaagtaaaattgccacaaaaatttacgtattttaagtgtacaggtccatgacttttgacaaacataagcaactgtaatagctagcaactctgatcaagaagtagaacatttccatcatcgaaggaagttctcttgtgcccttttgcagtcagttttactcaccagttccctacccaagacaactatcactcttatctgtatccccacaaattagctttgctctagaatttcatataaatggaattacacactatgtaatcttttgaatctagctttttttgcttagcaaactgagatttgcctattttattgcacatatcagtagtttgttcctttttattgagtattgaatttatgaatataccacaatttgtttactatttatggacaagtggatcatttccagtttttgattattacgaataaacctacaaaggacatttacattcaaatattattatgaacatatgtcaaaaagtagaattgctggatcatgtagttgcagggtacagctttttctatccttttactttaacccatatattcctttatatttaaaatgcttttcttataaataacatatagttgggtcttgcttttttttcagcatgacaatctctgccctttaagtggagagttggtatatttatatttaatgtaattattgaagtgattaggctaatgtctatgtcttgctatttggatttcatttgtgatttctgattttcattgcttctctgtttcttctttcccgccttctttggggtaaataaaatatatttcatattttctattttatttcctctgttgtcttcttacttatacctctacttagtatctttttagtggttgctctagggctaaaaaatgcattcttaattatgttagtctatttagagtcaacattgtatctcttcacacgtaaggtatgacattgcatacttcctgtttctcacttcctacccatcacctcccaatttttatttcctgtttcttgattctcacttcccacttcagaagtgtaataacttcgcaggaggataatttcatatgactgtccaccttgtctttagtatgattgttgtcctatcttttacttctatgtatactataaacctcaccttataatcatttttgtcttaataaacagtgttatcttctgtaaattatagaaagaatgataacataaccttttatatttagtcatttattttccattttcagtacatcttatttcttcttgtagatctgggttttcatcttgtgttgtttcccttcagcccgaaggctgttctgtcacttagcttttgtttatcttaaaatgcttttacttttctctcattattggagaatataattctgggttgacagttttttctctttttttttctttttttggcactttagagatattattccattgtcttctggtcagcagtcatttttatccttgtttccctgtacttaatttatttttctttcttactggctactttcaagatcgtctctttagccaggtcttcagaagttcatgatgtaattaggtttgattccctttatttatccttcttgggtttgctgagcttcttggacctgtaagtcagtgaaaatcaaattggcattcgggaaatttttggctgctatttcttcacatgcttttttctgcttcaatctcatttaaaaaaaaatcttttgggactcctccagttatatatatatatatgttagattatttaatattgtgtcaaatattaacatgcagctctttcatttttcttcaatcttccccccccccttttttttttttatttctgtgctgtttgaactctagctctttactgcagtcaggaaattgtctctaggcagacagccaaggtgaaaaaaataaaagaataagaatagatcaatgatattattaatctgtcttcaagttcaccaactctctgccatctccaatttgctgttaagcccatacaatgattttttttttcatttcagttagtgtactttctagttatagaacttttatttgcatcttttttttgtaattttctgcttttccactgagatttcctatctgttcactcattagggccatatttacctttaattatttgagcatattttctgtactttttaagacatatttataatagctgccttaaagtttcacatgccaagtccaaaatctgtgtcacattttccattttctttgtatgtataaatggttttttaattaaatactgggcattttggataatatgttttagagacactagattctgttgtttcccttagaaaagtattaattcttgcagcttaaatactggctgatcaccttgaacttttgcaggcttggttttatgctttgttattacatatctgtggaaaactcatggcattttccaagtccctctaacttggtaagactcaatctttaaactgttcccttgaggattttgttgtagtttgaatgtagtctttattagggtgagactatagtaggtcttattttggggtacagatcttactcctacagaggggcatttctggaatctcagattgatgccacagatgttttaacatttaaagaaggctgttctactctggcaggactggaactccaatcagctccagcacttctctttccccaccagtgctcaacctctagtaactgcgttttacctttaacactgtaatgggtgctgtctagaaaatcttggaagtctttccctgcgcatgtataactcagccctcagccatgaattcatagaggacctcatcttggactcatggggccctctttgcacatgtgtctctaataatccaccctgcagattctagcctttttagctgccacaaactatgacctctgcctcctcagcacagtgcagccactgtgttatgctttgactctagctctctgtcaggaaattgtctctaggccaaaaagccaggatgattatgggctcatctcataaagttttcattttctgaggaaacaaagtcttatgccgcttattgtccactgcctggaaatagttgcctcacatcttttgtccagctttatagctgtttccagtaggaaactggcctgaaatcaggtattttatcatggcaaaaagcagaaggcttccacttatctttgtctttaataatagttagcatttattgaatatttactttctgcagggtactcttccatttactttatatgtatgatttagtttaattcccacaataatgccatcaaataggtactattttttatcacagttttataagcgaggaaacagatgcataaggggctaagtaactcatggcaggaaatccaactagtaagtatcatagtctgaattcaaacccaggcagtttgaatcaagttaatgcttttaaatcatatattccctgacttgacaatagtcagcgctctgggaggatcattcagtgtattgttactatggagaaaatgcttttctcctctaaggatgagacgaaatgcttcataaatgcacatatgattattgctatgggaatcccaaaagaaggtgtggtcatgttatgttctgaggttggtgtgaagtagtttattgagtcctgttttagcatagcagttactaactatggcttatagtcaagatttgtatgatacagagggcttataattttttactggtcacatatgctagccttttgaatagctatgacagggtcaagcttacttagctatggctctttaaaaccctaagttaatcttacgtttccacatacttttctcatctatggaccaattgttccttctatctctctatcttacagtcccaggagttcctggctatctattctcagaaaacttgggtcttcttttagagggaaatggaaacaagcatcttatccattcaggtgaaccaggaacaggagaaataagacaacaagctgctgattgtgatcggattttttagctggagacctagaagagtaccagagcagagtgttttctggctgctggtcatatctgccttgacagatgatcagaggctgaggatgtatgagcacacatggctttgctgacatcagaacttggagccatgctttccatatagagtgttggtgagcatcactcctgaggagtgagtgcaacagcaagtggaagccaggcgtcaggactcagcatgtggattggggtcttggcttcctgccagtgatgaagttgtacgtgatggccagatgccctgttatgggcatctgtctgtgatgttacacccacttggtagcctgtggaggaaagagggtatcaacctggggtaggaagagagacgtgctaacggagaagcactgtggaatagcgggcacagacctggattctaatctgagttaaaatcacttacaagccctgcagtcttgtgtaagttacttaacctttctgagccttggtttcattaattctaaagtggaagtcacaatgcctgtcacatcccaccattaacgaattttgtgaagaaaaggaaataatgtatatgtaaactatagtatctaaccctgtttccaaatagtttcctaaggacaagagtcaatggcatgcaacttctggaaatttagttattgtgtaatttttgatttttgaataaaacatacatggaaacagttggctggagagatttggacacagaggaagagcatgggtaggcatgggttgtcaaggagtattaggatttgagtctgtgagagtcactgaaaaatcagctgccaagattagctagtgaattaataaacattttctgaagtcctcttggtacttagcactaggctaaatgctacagaaaacagcagaaatagaaggcagaattcatgcctctatgtgcatatagtctcctcaagtggtaggacttggtggtggtaacagatattttaggagaatcagcaatttgagtaggttggtggtgagcagaagatattgaagggtaagaggaaggcttgaggaggaggaaaatattcactcttaccgcttctagccctgctcaccttcaggcagggtgaacctcattctgttagcttagacctgtccccatcccaaaccaggctttaccacagcaagtagctccacaccctaccatctatagtgtctggcaacttggccatgcacctgcagccatcccttcagttcttacaatctagttccaccatgggcctctactttactttcctggtttcctttccaattgctctgcagggccacatgctcatctttgagtcttagctgctttggctgatacctgatacccttcttgcagaggtaccagcagcatcagaggcatcctagggaatggctagtgggttgcatttgggaaggcagggttaagtggagagtaaaaatagaacagaactgtaagtgtaaggatattcaggtaggaccgtatcaaggagatgtctgggggaatggtgattcaatggcttattagctagaaacagagattgttgttaaattaatctaccagtcttggagttcaggtagtgaccaaaacggagatatatagcagccacattaaattgattggatagaagatgctgccccagggaagggtttcatcttttgggtcctacctgtgtttcagtcggggtgctggcagggagacaatggcatactcaaagggtttaattgaagagagtttgttaaaggtactatttgcagaggtggtgggaagaaataagagacttagcatgagctgatgactaacaggctggagactagcaacagctggaagctgtgatcacccctggttgaatgggcaaggggaaaggaaacatgcctcaggggtctggtgagagctgtaagctgtagctatggaagagaagctgcccaacagtagctgtggccattcacacaaacacacacacacgcacacgcacacacacacacacacacacacacacacacacacgacaaagcccttttcagtgcaaacaacagtttaccattattttggaataccaatgaagaaataccaatagttttagatgaagtctttctacttaccttatctgggaagagaacagtgtagaaattaggcttttgtggttaagggttggctgcttcctacttcatcctgatttctgagaagtctaaaatcaagattctcccaaccttttggttcttgactgaacatttctctggatccttcccatttctggaaatctctctcacttagtcttagtctttccagtacaagctttagggtaggcatcatagaaaggcctctctgtgttctctctctcaggacttctccttcatgttcccatccattttttgaatgcttaatacatctgaaataaagacttttgactgggtgtgatggctacctgtaatgcacagattagtaggcagacatttattactgccaattaagtggtaggcattgctgtagccactgggaatgtagtgatgaagaagatggacaaaagccctgttgtagaactgacttgctagtggaggacataaatattaatcatgtaaaacatgatataaatttagacaatgttaaattcctcaacaaatatagagagtttagggttcttttgggtaatgtagtcatggaagatctattggagcaggtggcatttgtgcagatacctgatagatcaaagagagtgggccactagagaaccaacaaccaggacatatgccccaggacatgagcgagtttggtatgtttgagcagtagctagacagtcaatgtgattggaatgtagtgagcataagtgtattaaaaaaaggaattggaaagatagataggaactgaatcatgagggcctttcaggctacagcaagaggtttggatttttattctataatggaaagtcattttattctaagtgtgatggaaagaggatgattggaggatgttgtctttttatgttttaatctagctagagagtgaatagtttgtaagggagagagacacttaggtggctgtttcatcatttaggtgagaaatgatggggattaaggtcgcagttatggaggtggtggacagtgttagattctagatatatattcattgtacagctgacttaacttgcggaggttgcatatggagggatgaaggaaagagaggaattgtggatgactatgcagttgcataaatggtgttggtattaactgagatacggaagacttagggagaggcaacgttggtgcaagaaaacaggaagtgtttttgtctgaattagtttaaggtatttctgatttagaaatccatttgaatcttgaggtttgaagaagtcagaactagacatatcagcttgggagctgtcagcatagagatggtatttaacgccatggatatggatgcagtcatttagggagtgagcctagttagatggaaaaaatgtcaggtatcaatccctggagcattctacttttagagggtgagaaaaggaggagagacagagagagacagaaaagactgaccactgaagtaggaagaaaccaggatactgaagtgttattgaacctagaaaaggaatcatttcacaaataagagggtagtcaacattgttgaatgcagatgacagaggaagatgagagatcaaattgaccattgcatttggtgatatggggattactggtgacgtctatgcaagcaatttcagtagaggattaaagggagaatagagtgtgagtaaatgatgttctgcaagtattaggaaataaatgccactgggtctttcaactagtataatttaaaatttttagattaaatattttttctgttcaaaccacctctatacgacctcaagtgcttctaggtaatgcctagaactgaactagtagtccatatgtgatctgtcccacgtagaacataccaggaaaacatttttcttcattctgaatattctatgtttacagttgtagcctaagagaggttgcattgcttttttttgacaatcacattgaacttctgattgatattatcatctaagctttaaatcttgaacacacatgctatttcaaagcaaattctccaccctgttattatatagatgggtttttttttgttggggggctgtggtttggactgaagtgctggacctggtggttgtcactgttgcacttcatcttgtttgatttggcttgccaaggtctattttacatccaaattctgtcactcggggattgatgtcatccttttataagcagctccctctgcctttatccaaatcatgaataaacaggttacctgcttcatacattctgtggaagtagctgggtataaattataaattaccgatacattaattcaaatgtagacaaaccaaaggccatttttaaacacagattaatggtgggaaggccccacaacatcagagggtctggtttttaccggctcaagatcaggggcaggtggatgctgctgttgcgtgggtgaatttggatcagttcacaaaggctccttctaagatgcattcccctcatctagctgtgagcctccttgattgcaccatgaatctgcccaccattctctcttatagtctcaaagatctcataggaaacttggccaaatgcccccattgaaatcaagatcccatgtatttatatttctctgaatcaccagtctaataatcctatcagcaaaggttataataagattctattaaaaaataaggttaataacttgtattatttatttatttatttatctatttattgtgagacagagtctggctctgttgcccaggctggagtgcaatggcacagtctcaactcactgcagcttccacctccccggttcaagcgattctcctgcctcagcctcccaagtagctgggactgcaggtgcgtgccaccatgcccagctaatttttgtgttgttagtagagatggggtttcaccattttggccaggatggtttcagtctctagacctcgtgatccgcccgcctcagcctcccaaagtgctgagattacaggtttgagccactgcgcccagccaataattatttatttagcatattgtggtgtttggagtgctttaatatgtatctcacttaaccattgcagtgaaccatcacagtaacccggtgttactgggttctagggtgctttattttgcagatgaagaaattatcaaggaagtgaagtagtttaccctaagtttcatgactgcttgtaaatggtaaagctcagattcaaaccactgacatggagtttggaaattggacctaggcagctcattatggcaggctgttgttcacaggtgacaggatagaggaaagctggatgctccattagacactcagggctttgttcaggcctagcgtagtaacagcaggtatacagcagaagacagtttgcagatatccagcactaatggaaatcttctttagcataacgtaagacctgcctttcccaaactcaggattggatctgggctgagactatgttgttagggttattattactggcagctgggcagggctagtgcagaaatggactggtaatgaatctatgctgattcctggtgatcacatactgtattttttttaaagcaacagcactatttgcttaacggtttggtttagagcttttctgtgaatctatgcaagttagaactggtcatattttatggatttcactgtttttttgtttgtcttaaaaataacaacccatgccggtctcccatttaggtatctttttattctgcataatttcttaaggattattgataatgattcttgaacaaatcttcaggttatttaagtatctataaaagcaagacttatgtgctagacacactgaattcaggacctagctctatacttactaactgggaatttgaacatgtttcttaatattttagttattcatccataaaatgggaaaaatcataatacatactacataatattgttgtggggactaaattagttaatgcttattaagtatttagcacaatgcctggcatctcttaagaactcagtaaacactagccattgttgttaagttattgtcattgtcctgggacagtacctgatgtgtatgtttaagtgactgactactttttaactattccttttcccatatagggtttcagttttatcttaaaccatgtttgccttaccctttgcagtttgaagatcattttcctttgtggaagatataaaaagcaagataaaagttgaatacctctgccttctctttgtcattgtgtaaccttccatcatcacacaaaactgtttctatcacttcctggatcactttcttttgaacatagctttaacaagtcttttaccattttttctaagctttagccacttttcttacaagtttatccttatacttttataactgttctgtttttatatattatgagtgcatcctcatcttctgtatattttgttacataatctgatttcatcacagaactttttaggtaaccatattatctcctttaaatatcttctgaattagaattgttatctattatacagccagaatgaaataatttaaagcagtgaatctcttttaaatcacattgcccttttagatgtgtccatagactcaaattcattatttcttttttttttttttttgagatgaagtcttgctctgtcacccaggctggagtgtaatggcgcaatctcagctcatcacaacctctacctcctgggttcaacctgcctcagcctcccaagtagctgggattgcaggtgcgtgccaccacgcctggcaaatttttctatttttagtagggacagggtttcaccatgttggccaggctggtctcaaactcctgacctcaagtgatccacccgcctcagcctcccaaagtaccgggattacaggttgtgccactgcgcctggcctccaactttttattttctttatcatcctttccacagcatacccccccttttttttttttttttgagacagggtcttgctctgtttcccaggctggagtgcagtggtgggatcacagctcactgcagccttggcttcccgggctcaagtgatcctcccacctcagcctcctgaatagctggggctacaggcatgtaccacaacacccagctaattttttttttaatttttattttttttgtagagatgggggtctcattatgtagcccaggctggtcttgtactcctgggctcaagcgatcctcccacctcagcctcccaaattgctgggattacaggtgtgagccactgcatatggctgcaccctctctgttagctaatataaacactggtagggtgtggtcattttctcactgggacatcgttagttccatataaccatctagggcaggggttggcaaactacagtctgtaggccaaatctggtctgctatttgtttttataaataaagttttattggaacacagccacatctgcttgtttagtagtgtctatggctgcttttgcactacaagggcaaagtcgaatagctatgacagaggcagagaccatatggcccacaaagtgtaaaatatttactatctgtcactttacagaaaaaaacatttctagcctgttactaaggcttccttgaggtggaaaattaaacccccgatagcagctcttctcaaagatttcttaacctccagggaaatactgctgttagaaggaaaaatcagatgccctgttttaaaagaattaaacttctagcatgtctaaatacttgaaatcttgtatcgctatcatatcttgcctttctgccagttttgtgatttctttcagtaaatattttcaatatcctctttcaggctgagatgttgggtggtctctgctcttacagtgatattattatctgtcttattttatctttcactcaaatgctctcagccatgtatcctggttcctgaatttccatacacatttacatccccttaaatgccttccatacaaatttgtctttttttttttttcttttttttgagacggagtcgcgctctgtccccaggctggagtgcagtggtgtgatcttggctcactgcaagctccacctcctgggttcacgccattctcctgcctcagcctcctaagtagctgggactacaggcgcctgccaccatacccggctaattttttgtatttttagtagagcttgggtttcaccgtgttagccaggatggtctcgatctcctctcctcgtgatccgcccgtctcggcctcccgaagtgctggggttacaggcatgagccaccacacccggccacaaatttgtctttttaaaaatgcaggcagagccaggcaggtggtaaagtccttgactttgctcatttgtagactcactctgctccttctataattgttggacatccttctcagctctcatccaggttccatccatggggcaggatgatgctggagaaactggggaaggagggttatcgtacaaggtggtctctgagcacatgctgtcaactggagaaggataaaaccaatcaggagagtagctgcttctgctcccgggaggaaagcaatgcacattgtttaggtgtggatgggcttaaggatacacaccaggcaagggtcgatagccccgagattcaataaggtacagaacaagagcagtgaacctggaagtgacgaacgggggatagatgttgctttttgtcattgggtgtgtgttgctgaagctggagtggctttttaaagattctggattctagtagttccctggcctggtcattctgtccatctccgacaccttctcattttctgccttctcaatttgcaccatttccctttcttctccttggtctaagtgtgccccagatggatttattccctctctaacccacagtttcatacacacaggacttggcctttacttcagatctggcatattcttgccccgttccattgcctcctctgattgtcagttgctaaaacgtattctttctgtgtactttagttttctttatctatgaactcttcaaattgaacggaggaaaatagtttagtctggaaagaatgacgagaaaagaagagttaatggattaatgtaaaagcccgtcactctgtattttaacaataggtcattcgcagtacttattgtaaaaaccattaaaatcatcaacaggtcattagtgctgactttgaactagctcatcaaaattgcactattaatagcttcaatagctttgaaatgcttgaattttaatagccaggaatgaaaggtggagtaaggtgactattgggcttggttagttttaaggctgttagggaagtgcggggtgtttcgggggtccttccttaagtgtgaggctaatgccataggtgatggtgaattcagcttgatcataaagcatctggtgccactgtccagggagagataaagtgtaagaagtgctggtctgacctgctgagccataaacatgtttcttttcaaaatggtggaaatcagaaaaagaagctgtgctttgaagattctgtcagtaaacatctcaaaaatgacagctgtcctactttcttttgcagtccttttgtgacataacagctctccttttgttggagtctcttctaacatcacattcctaaattactccttaatttcttcctgttattcctgctctgttatgcttcgtaaaataggattttgcagaaaccagggtcgtgggtcaagtttttataggaagccttggactttgcctatagtcaaagactgggagctgctgagggctgtttctaaggtgaagtcaggctaagtggaggtcagtgccatagtcaaaggcaacactggcgcttcagccattgtttttcattgtcctcttagtgtaggttttcgtttcaggtgtgcattaaatgatacctggattctggtttttatgtattgttaaagcacagattttctttgtcctttgaggttttggaggacagttagcatttctaccattgccttcatttttatttcatgattatagccttaaggaaggttttgtccatgtctgtgactgggcatggatagtgggaaataggaaaataccacttttgcaccctatgctctagggtgtaaaactgtgaaatttaaataaaatgcagattaccatttagagaggataaggagatctcacacagaaatagaagggttaaaaaattacacactttggaggaatacgtgaaaagttgccatggtgtgagaaatatagatatagatatcagtgaagatacagatattcctctttttgctcttctagatcctcttcccattcttctcactctgctttgaccgtgatgagactgaaccctgtagacaggatcagtggatttcctaaggatctggttagcattggccaggagagagcagtcaggagggtgaggttagatggccctttccccagctccctctatccctgctgtgctgtgggttgagaatccctgccttcttctcccaaaagccagagctcctgtagggtggccactcatacacgtccagctcctgctgggttctattagcagctccctcacctttcttctttgggggagcagggatgataatagctctcacagttgtcagagcctgggcatttcaccagtccttgttggttcccttagactctgcccacaccttttaaaatagtcccttcattaaactctcctctatcttcccatttggagttgccatctgttttatgttgggaccctgactgatactatcctagatatcttatccatatacaatatacctattactgtgtaccgcttttacatgctgtgtgcagtgtatgcctcgggtctttttaaagcaccaaccagaatgtggcactgactagtccccccagaggcacaggttatagattctgggaagaaagaacaataagagtaagattctctgttttttatagggtaagaaatgaatcttcattctctccaaaactgagaagaaaatattcatccttccttttcaaattctccttacaagagagtggccttgttagttattgttggagtagctttcttattctggcccaaaagcaatgtaggtgagttgtcatggagacagtgtagggtgtttgttcaatggtagaaacatccatttgggctgagggtagactggcttcacccttagactttatttcctcttttggtccacagtggctaaattttctgtaatcagcaaatatggcccttaaacaaggagcttcttttagccccaagcaaagatggcggcatccctccatgctttctacccaagagagcagggctgttggaaaacagcaagtgtattgtgaacattcatccctttaccctggataacctgattcacttttagtaaacgtctctaaactcccttggatttattctctgcctactctctctctttaaagaaaatatgtacttaataactcagacaatgtaccatagaggtcacttaccatggatgtattttgctaatgtctgatgtgttgtactttatgcaatatagaactttaatggtatttaaaagtgcctcatctcattgcaatttcatgtctgattctctgccttcaccttagttctaaggttaggtgatttgttccgttatgtgtgaatattagaatacatttctttttttccagaaaaaatgtcagtgtgaattgtttccaagttgaatctaaacaatgtgattttaaaatagactgctttatctattgtggtgtttcttacactaatgtctgaaaaatattttgagaattgctgaacgatcagataaacagaatgcataccctagatttagtagaagctgtatctccattatttgggccttttttgcagctcatataaaataacattgcctaatttcaggaaaaaaaaagaagtatattagatttaaagaaaaaggaaaggaaaaatgccaggtgcttccaaggatgtaggtagcaggaattaatagttttttattttttttcctcagagatatgctactggaataagtgatgctagatggtttaatgtctttgtatcaaaaagtctttgtgatattgtgcttaagattagaattccaggaagagagcatccttttggcccagcataggtcacttgcccatcttttagaagggaggttggggcatgttgtttgacaattccatggagattttatccactggaggaggcgttgtttcccaaagcacagttttggtgctgttaccaccagtaggagatcaggtgcccagcaggcaaagccaacagatatccacttcatcatctctctttagttttttgtttgtctcttttccagatcattaactaagatgttaaataaaaccggacttaccacgggtgccacaggctccccaccaggcattcctctgcctgtgtacattatcgttgataattattcatttgcctttagtcagactttagcctctgtgatgagttttacagtcttgcccatttgaaatttcatgcgctgctgtatcagtctcttttctggagtcaaaatgtattatttcattgactgtgtgctcctctctactaatcttgtaatcctaacccaaataacaattcagtttggaagactgccatgtggccaaaacatgagctagtttttttctctccaccttccattgtggaagcgggggtttgagctcagacacccagggcaccctgctatctgccactctggctaatgaactggagacaccatgtctcaaatgatctgctgaagcactttagtgctctctgaaccattgaggaaagattgaattagattcagtctacttgtttaacctaagcatattttacactactcaaatccagtaaaaattgataatgataaatattatataggagagcttactgtgtgctagacaccttactaggtactttgcttgtgccacctctcaaaccttcgttccaaccctaacaatcctgagaaataggtataataacactcattttcctgatacagaacctaaggcttagaggcaaaataacttggtcaaggttgcatatttaacaatatatatttcttatcatttaacctctgttgccacttgtgcttggtacatacttatctgcctatccatctatccactgattcttcaattcagggaataatatatctatcgcatgcctactgtgggccagggactgttggagatgcacagtgctgggcacaaagctcattagacatggtgtcttccctgccaccaaggatctggcatcccagtaggctaagaaaagatttatatggaaactctgacttcattgaacctgacttgctgttcacagagaatgtacagactttcaacctccccaatactgctgtaccatctgaaatcccttcttagggaacacaagagaaacttagatagacatatagagagaaagatgtgcagtgtgttgcaaactcttccatcaagatactcgaaattacagaggagggtggaagctcatccttcaggttgagactgcaaggtaaagtagccttctgcaagagttattttctcttagcttttatattttgtcctgaaacttttttatttgattttacttttgagatatagtcttgctcctgtcacccaggctggagtatagtggcagtggcacaatctaggttcattgcaacttctgcctcccgggttcaagcgattctcatgcctcagcctcccaagcagctgggactacaggtctgcaccaccacagctggctaatgtgttgtatttttagtagagatggggtttcaccatattggccaggctgatcttgaactcctggcctcaaattatctgcctgccttggcctcccaaagtgctgggattacaggtgtgagctaccatgcctggttcctaaaactttattttaatatgccctttccctatgatgtttcagtgattatttcaatataaaaataaatttccaaaattacctactattgagtaaaatggctcaagaatacgtactgtgctttgttagggttttacatatccttggtgccgttaggattggtacaaatcctgcaacttgagaaccatggggcagactaatgtattagtcaggattcacagaagccaccttgggtattttgaagaggaaatttaatacagggaattcaaggtttacacaatctttagaaggctggaggagtgaagaacaggaaagcttcatttgggaaaaatgtaagcgaagggctacagtgaggcaagtgggtgattctcaggagatgcctgatgtcaccggcaaaactgtacctttgccacaggccaacatcaaagtgacgtcttccaggtgcacctggagcatagcagcttctttttctcttccaccttccccacctcagtctggagcctctcactgctgggatctaaccaggaacttgttagcaaaaacatccaggaaaggaaggaagtttctaggcttcataaacctggaatgcaaaagagagcttagagatgtgagaatggtgctaaggatcaacaaacaatatcctgcacagttacaaaatgatgtttttgcctaggataaagcagtcttatcccatcttttccctacttccattctattcctttgaattttttccttgagaagttaaagtaccaatgaatgatgcttctgtgagaagcgtaagtgagttggggaaatttaattctgttgactctcattttttcacttcacctcctactctccaccctcctagttctcccaatccccgtttttttttttttttcttgagatagggtcttgctatgttacccaggctggcctcaaactcctgggctcaagcgatcctcctgcctcagcctcctgagtagttgggattacaggtgtaagccaccacacccagctctaattcctttttttcagtgaggaggcgggctcttagtcccaggattgtgactgaattcctctgagggctttttaccaccctaggcctcttcagagataagctctttagggaagacagaagggagaaaatctgaattgatggcaaggctttgtggtgtattcctctgcaggaatgtgatcttcctcctgtggtaaagggcgtcaaatgctccagccagttcatctgcatcgttgttgctctcattttcaaggtgattctgatatgaccccaagaatgtctgctttttttttgagttcctgagctcccacattcccatcagtgttcagaatggagggccatggaccctttccagggagacgatccccgcatcagcttccaattttcaagcaagatcttggccaacagctttatagggttcatttggatgcttccctaccttcttataaatggatactgtcattttccactagtaaacccaaagacttagtttaagttgatgcacggtcttaaaagactgcatcacgtggcatttgttatttttagagatattattaagcccttaagaaaaaaacaaaaagccatattgtctctacctggaatctttcatgtcatacaggccactatttctagaacgttgaggtcattccaaaagtacatattagggaatgttagtttagaaaagagtttgaattttagaaaagttgtgagagaaacaaatgattcaatttatgtgggtgtttcactggaatcattataatagaatatttgaagaataggagtttttaatccctaacttgacttttttggctttttacgtacatgatatatggggactcctagaaccataaagtataaactagattcagaaggtctctaagaaccaaactttgaacatacacactctaactcagaagactggaggttaaaggaggttaggtccgtgtgcatatttgtgggaaggtttggttatatgcacgctaactattgaaatcaggcagataaatgtagagcttttggaatttgcatgtggaggaaaagaaactcaggcccactgtgggaatttcccagaaaggggtgtgaatctctattcttagctggagttagaagtctctatttttttctttttgagaacaagataggtattaaatacatgaagtaaatgaaaataagttagttgaactgctaatagttttgagtgggtggaaggattgagaaggatcctagacaaagaaagctgactttcaagctaattgttccaaaaagacatcacagaagggagggactaagaaatccattttcagctttgttttgataaagccattcatttttgaaactacaactactgtataaaaaagagacctcaacttcataatgtgtagtttatgaatcaatcatccacaggattttaggagaggaagcaaataaccatccctttaatacattttcttttctcctaaccaatgtctaattgcagagcgtgcattgaaaatgaaagggaactggggttggttgctgctatttgtgactgataattaggcaaggggtcagaaaaaagggattttcaattgccatgtggccatttttttaacatgtccagatttcagaacatcaaactcttattaatgcataaatgcatggtatttggttgtcaaattcaattgaactaagatttgttgagtactgactattttccgtatccttttctttttttgagacagggtcttgctatgtgatccaggctggagtacagtggtgcagtcatagcttgctacagcctcaaattcctgggcccaagttatcctcctgcctcagtctcctgagtatttaggactgcaggcatgtgccacaagtctggctaactttcactcacatcattatgttaatctttgcagaaatcttgtgaggtattactattcccattttacaggttagaaaattaaggtccagaggagttaagagatttgtatctttaaatgcacttagggagaaaagggtggaactggtactgaaagctaaatctgatggatgtctgatgccaagtccagggcttttttcacagtgctgccctacttggttccagtttctggggacctgaattctatcattgatattgccagctgaccactgtgatgcctttatttgagaaaatccacccaatatgtccaaagagcctggtgaggtgacctaatttatcagaggattaaaaacaaaaacaaaaacaaaaactctaccaaaaatctgatatttttctagcatatagtataataaaaaagaaaaaaagaacactgttgcatattttgaaattgccacttaaagtgagatattcccacaataatggaacaaatgtttttcatccaaaaattataggctggttttgactttatacctatcagtgatattatatcgttttctgtgaatgttctaacttccttctgtactttggggtaagtgtactccttaaaacttggtctccttaagcatggcgtagaagatcaatcttaagaatccaatggcatgccaggaaattttccagctagtccacatttaccctggtcactgctgtcctctttttccttcttgtgcgtcactctattggactgtactttatggctgcttttagcctcctgacatttctctctgtacattaactgtcatttagtgcctcttatttaagtaccacagcacttcgcaatacagccggcccacccagagggtctccagctcccactggaagttttgcgtcaccatcgtatggatagttggctatctgcagcagcagtgcgtggtcttttccaggaaacagcaaacactattcccatatattgtgggttgctggggcttgtaaaataagcagttttgattagcagggttatggggttttattagtgggaccccatttggagccttgttttaatgggatgtgacccagagggacatgatgtgcttggactggttgcctaaatttggaagaggctcaagggagccaggaaggactggcaggtctgacaggcttgaaaataaaaatggggccagtattcaggcttgccccttagtgtggaatgcccctttcttcctttgtgctttcctttcttcccgtgttcctttcctgaaatgtagctttctcttccccatctttgcctggcatatttctatttgttctttaagttgcaactcaaaggttacctcttcgtaaagcctttcttgacttttccccacgccaggtattgctgcattctctgtgttcccagatgtcttgtgtgcaccatgtaccatatataataataatttgctatagcattgttactaactgaactttgagcccattgtcatcctggcgtacattgaggattaaaatacacacacacacacacacacacaaatgtgtgtgtgtgtgtgtgtgtgtatatgtatatgtatggagagagagagagatagagatggggtcttgctttgctgcccaggctggtctcgaatcctggcttcaagagatcctcctatcttggcttcccaaagagctggaattataggcgtgagccaccacgcctggccgatagatatttatcaaatgagtagatcagttttcctttccattcccaactttttcttacttggaccaagatttttgttttgtttttgtctagagcaactagtttagaaccattcacacaacacatttaatgttatggaatgaagatcatgaaaccacacaagactcatgccttccaaatgagagaatgaatctgttctctcttagggccaatctcagtttggcaaagatgataatttgtttatgatctcaaacctaacaaacttcctgatttaaaatgaaagttaacttaatattctttattgcttcttggaatctgatcttggcaagattaatgcaaaaaatattgttaagtaaggtattcttgtggaatttttgactgagtgaaatggaaatgtcaaagatctcattttcaaaaagtcccccagcctcttgcccctaatctgcagtcagtgcacaggcttttatttcctggcctcaaagctctggtttttgcttaggtgccccacagctctatagagttatcccactgcaggaggacccttcagagaccattacaagcataggtccaatttatgtacactccccaaatacagtgaaccaaggggagatgttgattttacctgcattttaaaaaacaaatcatctagttgcctagtgattgaagggcactggaaatagccattgagtgatctcattttcctgcctcatcacgccagccttgatggaagtagtagcaaaatccaagtaaagatgccagccaggtgcttggaagtttcagatgtcttgtctggaagagtggcttcagatggactttggcaacaactggaggtggtcctaaggctgtgctagccaatgcagtggccactggtcttatgtggctatttacctgtaaattaatgaaaattaaataaaataaaaattcagtttctcagttgctaagccacatttcaagtgtccagtggctgcatggggcagctataatggacactgtggatataaatttccatcactgcagacagtcctgtttgagcagtgttgttacaaggggcctggagcctataacattgtatcttctgcaagatcctgacttcctgaatggccaggagcagacccaggaggcacagcttaaaatagagagtgaggtcagcaaatggttttggcctgcctgtggccaggggttgggtgatgcccatgggtacaactagcaggttcgaaacatagctagtgaagaggaaggaaatggagtggtttagactccaatcggtgtctaagtacagtgtgactaacgtatgccaggaactatgttgtttgcttttggctttgttaccttatttcaacctctaagataagataatggcctgctaaaaaaatgggtacacaatagatgtacatattttgggggtatatgtgatattttgatacattcatataatgcataaagataaaatccgagtaagtgggatagccgtcacctctaatatttatcttttctttatgctggcaacttttggattcttctcttctagttatttgaaaatatacaatagattattgctaactgtggaaaccctactgaactgctgagcactaggtaggtatttttttgtacccattaattaacctctctttatcccctctttcctctacccttcctggcctctggtaatagataattctctattttcaagagatttactcttttatctctcatatatgagagtgagaacatgcaatatttgtctttctgtgcctggcttatttcactcaacatagtgatctccaattccatccatgttgctgcaaatgacaggacttcattttttatgattgaatagtattccattgtatacattataccacatttcctttatctgttcatccattgaagggcatttaggttgattccagattttgactattgtgaatcatgctacaatgactacaggagtgcagacatctctttgatatgttgatttcctttctttgggatgtatacccactagtgggattcctgggtcatgtggtagttctgtatctagtttttctgagaaactcaatattgttttccatagtgactgtattgatttacattctcacccacagtgtgtgagggttcccatttctccacatcctcactagcatccgttattccctacttttttgataaaagccattttaactggggtgagacgatatctccttgtgttgtggtctgctttttacagatgaaaaagctgagactaagaggcattaagtaccatggaaaagggtgcaagctggaacctgatgcttctaactcttgagttcagtgcttttttggctttaggggtggggaggagtggggaggaggtaggcaggggaccagtagtgaaaaggtgagacaattgatttgaagaaattgacctggttgccccagttcattcattcatcccatagagcctggatcgtgctcaaccactttctcaaagtctgttgttaaaagctgatgctgaagtaaatttttcttctatggtaagcttaatgaatggaatgaggatctgctgaatctaagatcaaagatgaaaatataattaataataatgatgatgtagcaggtgctgttgtacgtgccagacactgcactaagcatttttcataaattaacttatttaatcctctcagctactctatgaggtagatactactgttacgtctattttatagatgaggaaactgaggtttggagagagaaagtaagttgtctaaggtcacacagcaagaaagtggtccctgagaaaccattatctccactaagcatttacagtggagatggccttggggcaaggtagatgatgtaaatgctagaagtccctgagtgtggggcaatagggagagttggagtatgtgcctcgtctagtgtttcatattcacactacacaacacaacaattcagcaacatctcaatgaagcccagacaaaactcacctgcaggtggcatattgcagacaagcagacagtttgtaactattcaattttcagaggttgaaccagaggcccagagggatgaagtgactcactcagtgcctcacagacagcagcgccagcagttcagtgccctttaggattccttccctgcctccagcaccagttttaacccctcttggcatagttggttctcaaagggggcactgttagagccttctggaggctccaaaaaaactctcttctgtcacctgtttccctgtcagccattccacaagtgtctttggttgtgtgcgagtagggtgagtacaggaagggcatcaggggtgttgaatggaagattctggcctctaaaaccatacttgaatgttgtgctttcatgagacttttgttttaggaaagaaaaggaaacatggtaagcgtggctccaacagtactaaagatctatgtgggatcctccatccaggccatgtggactctgggcattgagtttctatccttttcacatgggacagtagctttccactgccactgttactctcgactcaggtggaaggctggggggcatgcttggggagctcagtcatttctttctgatgggaggactaaggagtgacatgaggagttaccaaacccactgaggtatgggactacaattctagcctgtaggaccaggagcctgcctacttcgttttctaagcagagacattgaggaggggggacccagggattttttatgtgcatcctgacccctcttaccttcctgcctctggtttttcccattgggaggcgccaaaagtgcactttacaaaatacacatgcattcactcccccgaagaactccatgaagaacattcatcctcattttacagatgaggaaactgagactcttaaaggtctagtcatactgaaaaaaaagtcgtttgaaccagcacctccaaatattaagggcacactccttccatactgcagtggccttgactcttgtgcatgggacacttcaggttcagacagagcaaggctacatccgcaccctgtgcccacaagtacggagctccgagcaggaggctcaagtgagcccattgctctcttagaccggccatactccctgaaaccctaatggcggtttagtgtaggtcatgttcaatacgtaacttcaataggagtattaattcctttcagcgttgttcacccatcatttcctttaaatgctaaacctttggaaagtgattcactttcccctctcactttatgtttcacttactttctcctttcttcttcattaacatctgcttgtttctcctctcttttgcttctctctctctgctgattctctgtgagtggcaagagaccccagttggttattattcactgcacagagtttttagattgcacccagagtgaatgtcagcctgtgacagaagagctacggcatcagctccatcttaatgagcgccccatgcttcctggggtgggaagcactaaggaaccgtctacagcagagtgccctttcagggtagcagctcctccctgtgtaaggtgcagttgctgagggaagaggcagtaggcgagttctgaggggcttggttaatttgtgcgcactagtcactcattccctggccccgagtgtggctgctttcatctctgtctctccgcactgcacgcacagtacggcaaagctttgctgcactgatggcagaggcaatcaagcctgccgttttcttgctaaatgctttcttcgtagaagaaatagtgtgaggggttggaaaaaaacagagaaggcagagaatgaaagagaccgaagtgagcaggtatttgaataccttcccctatgtgtctgcggtcatccaccttctgcgagggctggaccacagcacccctgtggaatctttcatgccgcctggtcattttgagggtgcgtgtgtacgtactaggctggagggagaccccgaggtctagatcatgattcgtggaaaagggagggagaagaaatctttttccttcaaagccatagaagaaaagggacccaccagaaagacagaagacatgattttgatttattgcctggggtaaacaggtagccaaggagaagtatgtgaagaataatgagtattgacacaaactgcagaggctgggggttgttcctgtttgccaagtggtgagctcagagcagacttctgaggctcacttgctttcgttgacgaggccttcttgttgcttacttctccagacctccacatccttgcccctgacttctagcaaggcttgatgtgcacagatctgacatctgatccttctgtacagtcccctctggctgaagcacctatgtcatcattcgttcatttcttattcaaaactatcatcttattctgcttggctcattatcctttatttttttttcttgtaaattctgtgctaaatgttcgagatacaaaaatgaattaggtacagtcttttttccaaaggagttcatgtctagttgaggagatgataagactcactatggtagtaggtgcgacagtagaggtatctagggggtctataggagaagagaaagggcctggtccagggagatgcagaaagggttggaaaatatcttttacgtaagggtgatgtgtaaactgaagtttgatggctagacaaggagagaaggaaaggatattccagacacccatcagtgtgaaagcgggggtatggagatgcaaacaagcatgacagatttggaaaccttgaagtaaagggcaattggtttggtataaatgggttcctgagagatgccatgagatgaaagtaaaaatctatgaaagatgcaaaccacaatgatcattttcagtcatgctaaaggattaatttgaactatatcctcagagctgcaggaatccactgaagaatctttaaacagaggaatgacacagtgaggtttatattttataacaaaaaatttccttgggaaatggtgtgcggcagtgttgcttagagcaatgtgaattggtggcagagctcatttagagacctttgcaataatcctggccagaaaagatgaagaccttagccaaagcagtggcaaagagaggaagaggaaggaggacttgcgtcaaaggattagctatggacaggaggggctgcaccttctttgaaaccagagagaaagcaagagaaggctgcctattgctagcataatcttgtccatgtgttttgcccatttcatcaggcaagtgtgggtccattttcatccaggaacctaacaccaaggcattttagagacatagattcttgcaaatactctaaatatcccctggaagaaatttgggggtgtttatgtgtgtgtcctatcagttttataagactctatgctcttcgagggagggcgcacacaacatattcatccatctgtaatgtgcatcattcagcacaccagggatacttaataagtatttaatagtaataagatctgagccccaggaacattattatatttgtcagtaatgaaataaccaggtttggaagcaatttggctaagattaaattttataagaaaatcttaattatttgaacttttgaacatagtcaagcccattcctgaaatatctaagtggcttctgctcttagtttgtctaggtaaatattttagttggcttaattggagattgtttctaaaactgtaggaggtagtatttctttgttgttccataatctctgatgacctgtctttagaaacaagaacttttacaatgatgcttaatattttctaattcaggtccctcctctctttcctgatacttgcataagtcgggacagccaccactcatttgtctgtgatttacagcacccttttctctctatttacttcctcgtcacatttacctttattgctgctagatattccttcacaccttaaggcactttcttatcctttttcttcccgagtctttctagtctttgtcccattttaaggacaagtgaagtgtcagccgtcaggccgctggatgcaatctgctttcacagtgcattagtgctgggcaccagaccatgtggtacctgtgtctgttatgatacacccagttgatatttttccctgagattttaataagcctgatcagaaagtttcactggatttaagaacagtgctcattatttcctgccctcccgtacattcaggttctacgtcactaggacacacggccctatcccgaggtactaacctgaaggtgctgttattactgaccattcaacataaacaatagacttttaaacaccctgggatgaatccaggtagtccttaccaaagacaagctctcatgaatggtagtgttcatctttctttgctgcggttattctcacaaccagtcctggcttagcatatgatcttctatacatgtaagcagtagtaagtcaactttaaatgaagccctctgtaacatggcctgcctgagctgtggaatttggagctccaaaattttgccctttgtgctgtccgaggatcattggctttgatgagcttgtggaaggcagaaggagagaagaaagtatattcatgtcatttttttggagcctgcgtttgttacagagtacgagccagcagccatttatagtgagcatggtggacacacaatcccaggactccttcttcgggtcactccactctttaccaaacatttctagattccatgatagtggctcttcccttctggagcagtgcagcagtgtgcttcgtgttatgcacttatcagaccactttgaaatatactttcttcaataccatgcaatcactgaatatactggtgtgtgttttgtgagatgtctcaagcaaggggagatgacttgaaacgagttgtagaaaaacctgttgaaggaagtagtgttatttaacttgagtagagaggttcagggcagggcatgacagttgccttcatgtatttgaaatgttgtagggaaggagattaacattgttctatgtctcctcaaagatcaggtgcaaggtagagggagacagagttcaactcattataaggaagaactttcgggtgtgatagttaagaattttgctctgagatcaggcttcctgaatttaaatccatcatctgctagttactagccatatcaacttgggtacatttttaaaaactcttttaatctttagtttcctcatctgtaatatgggacaatattagtatttaactcatgaattgttatggttagctgatgccatacatcagctaaccatgctcttagcatgatgctcacagggataatgctggcaactattaacagtctcaattgtctcaagatagtatacatgtttaacaacagtttccaggatttcccattataactgagcactatatgttcttttctgttttttttttcaaatatgtagttcattgaaatatatatgtgtgattttctcagttttttcttggatgatagagatggttggaggactgagaaggcttagctttcagaataacttgaatggcatagatattcctgtgatgtttaggaaaaagtatacagtgcagagcgtcatgagttcaaaataactggggtatggtgtaggatgggtgaggatgccattctgccctgctgaaaagttgaattaggactttttaaaataaaaaaatgcagttttaggattttaaaatactgtatgcatttccaattaaggcacttagggtagtagtaagtaaaatgccattcatggacactcttttaaagaaaaagatgaattattttatcctgaattttaagaaacattgaaataattaaatctgtaatttgccatgtcttgagctcttgttcatatacttttttttaaaaaaattgaggtataacatacacacagcaaacttcactcatctcaaatatacagcttgatgaattttttcatatgtataacatccatataaccactaaacagataaaaatataaaacatttccaacaaatcagtttcttcatgcccatttccagtcaataccattccctgttatgttataaccactattcagacttctgtcaacctgagataaattttgcctgttcttgaacgtgataataaagggaatcaagcaatagtactcttgtgtctggaggacttttttttttttttttcctgagacagagtctcactctgttgcctaggctgaggtgcagtggagtgatctcagctcactgcaggctctctgcctcacggtctcaagcaattctcgtgtctcagcctccagagtagctgggactacaggtgtgtgccaccacgccctgctaatttttgtattgttagtagagacaggtttcaccatgttggccagactggtctcgaactgtggacctcaagtgatccatccatcttggactcccaaagtatggggattacaggcatgagccaccacgcccggccctctggaggctttttcttagcatcttacctatgagattctttcatattgttgtatataatgagtttatgcaaagactttttttatctagattgctttacatttagaatgaattattttactacaaataaatttttggaaattgtgaggctgggaggaatcttacaaagcttcatgtccatatcatttgatttatgtgaaacatctgacaccagaagatattaagtaatctgcatagttttaactaatggctaagtaacctagtatgctgtatcttcatagagataaatctgttgcaaacattattctcagtaagagtcatgcacatagtgtctgaattatacatagaaaatgtgaatttttataaattacattatattaaatactaaaatttcaaattaatatgatacaaattaatcctattcattaatggcctggcttcttggattttatacacattttgacaatgacattgctagagcagtttgttcttgttgtccagttaaggaaatcattgtcatcatgttcattaatgtaagacatgaagtgctgtgtataacaaaatggaattgattttgtctgattaaatcttaaacacttacattctctttttctctctttcttacacacacaaacatattcataaggagacatacactacctacatgaaatgtgtgaaaaccacacattttctagggtataaccatttatctctagatcaagtgagacattgtctctctacaaccctattgttattgaaactcaaaaagttgttcttgcaattgattgaatacagcaaaactgtaaaataaggatatgagaggagatggaaaagtggtacaagaattgccctttagtgctcagtgtactttaagctttgacataggaggacaagaggttaggtcctgactacctgtggatttatgggtttacttgtagttagggggccaggtacaagatggagtatgttaagtgacagaggcataaaaaagaccattcatttctgagaatatggctgtgtggctatttagcccaaccctctgctaaaaacaaattaaaatgtcaataaaaggatgtctgaaaccatcaaattgctataagaagataaggcatcatgatgctgaaatccaagaaaagtattgggagctctgtttacccaacggtatttgctgataattaagctgcacttttcatggcctggcagaagagggcagaaccaaatcttgggactcaacccaagcggggagcctagggaaaccctcccatattaagctggactctcagaaccagaaataacctgtgattatatgcacaggcaattttatggagagcgtccttgaggctgagcagaacggggctggggatgggaaagtgaagaaaacaacaacaaaaaacaagaccctatccctgagaagtttctggctctcagctcgtcagaatacttgtaagctatatttgcataaatgaatggtgaagaaccctccagcagtgaatttagtttgagatggttctcggtctgtagttcttttaagcacctggcagaagcaaatgcaaaacttctttaaggaagacgtcctagactgccgggaaccacctccccactccttcattttcaagggtagtgaatagtatagtcaaagaaaaccagaggaaacaacagagtgcagaaacagatcagcacattctccagactttggaattattggcatatagtatgaaacaactatacttaccacatttaaataaataaaagggaagcttaaaaatatctccaggaaccaggaaagcgcaaaaagtatttttgaagatttgtaaaagagccaactaaaacttctaggaacagaaaataactgaaagtgtaataaaagctcatctgattgatctagcagctgatttgtatagagctaaagagagaattagtgaactggatgaggagtctgaagaattttccagaaggcagcagggagagaccttccccactgtcttccatgcatataatcagagtggtgagagaaaataggcagaaaaaatatatccgaagaaataatgctgtagaattttccatgatcacatcctcatgagaaaaagtttattctaccagaactatgtaacaattttgaatttgtacatacttaaaaacatggcctcaaaatatctctgtttatctacctatagttataaatgaacagatctacaagaagaaaaagtcaaatctacagattcaaaaggcccaataagcactaagaaacataaataaatgtatgtaacatttatatctcaaaatggtttctgcctcaaaattatatcataatattatagcagaaaatcagctaagtagagaatatcttaaaagaagttatagaataatggaagattatttttgagaaatgataggcagatgaactcctgacttctcaagaacaacaaaagccaggacattgtagaaaatttatgtgtcaaaagaaaataactgacaccttagaattttacaccagtgaaaatgtcttttagaatgaaataaaagttttaaagatttggaaaaataaaaactagaattttgaacaccagcaaaccttcagtaaacgatattctaatgaacataagcccaagatgaaatgtctgagatgcaagatggagtgaagagcaagtggagtagaaaatgggaaactaaatgattattagccatttgcaaaaagataaagatgactaatagtgatgcaattaaaagtaagaaaaataatgacaacaaaagtgtacgtataaattaggcaggaaggttaatggggttaaagtgtcctaagatgcttgtattttctgaaagaagggtaatgatatgaattaactctaaactttgataaattaagtagacatattttaatttctaggacaatcactaagacaccagaaaccaagtgtagaatttacaattagcagattggaaataaaaaatgataaaatattcagtcattgtaaagaaaggaaagaaagagagaaagaagaagaaacagaggaggtgtggaacaaatagaaaacacaaaataaggtgataaatttaagcccaataattacactaactaaaaatgctgaaattacaaaatcattttcatattgtattaaaaataatattctgtttataagtgacatatctaaaacataatggtactgagtgactatacaaagttggaaaaacagatgccatgcaaatattagtcaaaataacactaatatacctatattaacatcagataaaatagacttcagacagattggtcacttgaattgattaaatattttagattataatgtaaacatcttagattatatgaacctagtagcaaatctcaaagtatataatatcaaagttaacagttgtataatgagaaataaaaatattcatgattatgataggaggttttaaaaatacttctctcagttactgatatggatataggagattcgattaatatgattaacaaacttgacatgaaaaggtaaatacagaacactctagtaaaaagctaccaaatattacttttatttcaaacatatatggaacatttaggaaactgaccatttatcaaaacttaaattacatctcagtgaatttcaaagggactgaaattaaggccaggaagaccttgttcttcctgatcgaagtgcaatttagctataagtaaaaagcaaaaggacaactagcaaatctcatatgttttggataaataactcgtgttaaagatgaaatcataatagaagtttagaaactatttcgaattgaacaataactaaaatgctacatatcattatatgtaggttgcagataaaacaatccttagacagaaatttatggtctttatagcttatattttaaaaaagaaagactgaaaaataaactagacatctgtctcatgaagttaggaggagaataaaattaaaagagtacgaaaggaaggaaatgatcaagatgagagtaagaataaaagaaatttatgataaacatatattgcaaagtattcatgaaacgtaaagttttttttaaacttatacatttacaaatgtctggtaaggctggtcaacacaaaataatataaggtacaaatggtttaaggaagaaaaatggggatatcactagaagtgctacatgaaataaagaggtaagaaatcattataaaattttatgttgatgaattaaaaaaattagttgaaatagaaaaattattggagaatataactcaccaatattgatttacaaataaatagaaaactcaaagattatgatcattttaacatttaattattagtaatagaaatctttctaaaaaagtgtgccaggcttagttagcttcattggcaagtcttggcaaccattaaagaaagaaaaattattatttttattattatttgagagggagtcttgctcttgtggcccaggttggagtgcaatggctgatctcagctcactgcaacctcagcctcccgggttcaagtgattctcctgcctcagccttctgagtaggtgagattacaggcgcaggccaccacacctggctaatttttgtattttcagtagagacggggtttcactaggttggccaggctggtctcgaattctcgacctcaggtaatctgcccaccttggcctcccaaagtgctaggattatcggcatgagccaccatgcccggcgaaaaagtatactcttacacaaactcttcagaaaatgaaaaaagagatgataatccttagttttttgttttgtttttttggttcattttttaaaatgtatctgcaaagaccaaaaaataatgtaaagcattatgaattgaagtagatgaaaggaaatgctatatttacatactgaaaaactgcattttaaaattattaacttgccccctaaacgatgtaagattcaatttaattgaaattaatatgcggcagattttttttcagaatttaacaaatagattgtaaaattaacttgaaattgcaaacagctaagacacttaaagagaaagaatacgatgggaaaaattgctttaccagatatcaagatttattttacattacattaactaaaattgctccaattaaaaaataattatcagattggattattttaaagctgaatggtgtaacatttttgcaagggtatacaaatatatcaatgaaatggaatagaaaacttccaaaacagagccccacttttatagtcacttgataaataatagaagggcatggcagattggtggaaaaagatagactttttaataactaatgctgaaaaaatttgatatctgtataaaaaatacatttctcacctcacagcatatacaaaaatttatttgagatataaatgtgaaaggtaaaatacagagactataggaatatctcatgaacttgaagttggagtagggaaattttttgtgtataaagcaaaatacttctaaaaataaaagatgagattgataaattcaactatattaaacttaaagtcttttatttgtcaaattataccaaaaagataatgaaaaaacagatcacagagtgggaaaatatatttataagatacgtagctgacaagactcatatttactattatactgtctaagacggtagccagtattacatacgcctatttaaattaaattaggtttaatttaatttaaaaaatgcttctttattctcactagccacatttcaaatgctcaatagccacaagtggctactggataccatattagatagacaacactgatttagattttataaagaaatatatatccaaaatatatacagggtagtttctttaagttatattcatttatatctgtttaaagtatccataatgtataaagaaatgaatattcttgtataaatgagtaataataaaaaagataaatcagtggtaaagtggacaaataggcctttcccagaagaagatgtctaagtggccaataaacatatgaaaagatgttcaacctcattaggaagcaaaggaatgcaaatgaaaaccactataaattgccgatatatactcaactgattggttaaaacattgtttaaacttggcaatactgaatgttggtgagaatgtagaagaggaatacttctacactgcttgtggaaatttaattggcccaatttgaaaaaattgtttggcgttatctattaaatttgaatcttagagaacttcagttattattgtactaggattcttggacaagaatagacatgtcagaattgccccaagttggaatcaacccaaaggtcttatctacattctaatgtagataaagaagttgaagtttaatcataaagtggaacagtacatagcaattaaggtaaatgaaccgcagctgctcccaacaacatggccaaatctcagaagtatgctatagagtaaaagaagcaagaggggaaataatacatatggtatgattctaagtgattctatccacgtaatgttctaaaacaaacaactgaacatactgtttagggatgtgtcattatgtgaaaattacaaagaaaaggaagaatacgatgataatactcagaatatgattatagtactcaatgggggtttcctgcactggtgagggagaaggttataatatgggaagggcacacagggacatttttggacgcttatggattctttaatctgggtgatagttatggaagtatttgcttcagaatttggaacaatgtgcataaatgttttattaactttttttttttttgagatggagtttcactgttgttgcccaggctggagtgcaatggcgtgatctctgctcactgcaacctccgcttcctgggttcaagtgattctcctgccttggcctcctgtgtagctgggattataggcgtccaccaccatgaccagctaattttttgtattttcagtcgagacggggtttctccacattggtcaggctggtctcgaactcctgacctcaggtgatccaccctccttggcctcctaaagtgctgggattacaggcatgagccaccgtgcccggccttattaactttttatatgtatattccacaatgatgaagaagggaagctctaagctgcttatattttcttgagttgatatgaaaagaacttgtagaggaaggatatttgagagtgttcttgaaatatgaatagatttaacaaatagagaaagagaaagatcatcctaagatgggaacatcatgaaaaccacatgggagtggtaaaatatgcctgtttggagcctatgaataatatgtgggtgtcctttaggggagctggtaggatataaggctgttatacagcttagagatatagcatgtgagatcatcatagactcaaagactatggtgaaattattcctcaattaaaaaaatttgtacatatactgtcttctataaagcacatctgtggatttctctaaaaaaagcatggccatagctacgtcttcataggttttagtatcagacaaaataagaaaagtttccaacatcttaacatgctcttctttgtgtatgctagctaacaggaagtggatagttggcaatgtccccctttgacttatttaattacaatgaattatttggtttaaattattattttgacataggaaataatcagatttaatgttaatgtgttccttaatgtgtgtcagttactttttactactatgctgtgtgcctaacaaaaatgcctgggccaagaggagacaacacccctctggacattgctgcctattttcattttcatttgggttgaacatggcttacataaggtacctccccgattgccctacgattaaacactcttcaacttgacactgacccacttccttttgccagatcatagtgtcttgtcttatttttattgaacattacccagtcttttttttttctttaagggctgtttttccaatttaaagaagctgtgtgctttgttttctttctttcgtttgtttgtttttgtttttgtttttttgacttcaaaacaatagggggctttgcacaagttagtctcctatgttaatttaattaatgtggtcttgattccagaattcaaatctttcataatatattttgagttgtgtaagacagtgttaggttctaaatttatctccggtttataagctagattgacctgacttattggcctcttagaatttcaagttttctcatctgtaaaatggggaaaggaattcttatggaaaccaagcacagtatctgacaaaacataattctcagtaattggtagtggtagtagttgtaatagtggtagtagtaatagttgttgctattattattatttttgagacggagttttgctcttgttgcccacggagtgcaatggcacaatctcggctcactgcaacctccgcctcctgggttcaagcaattcttctgcctcagcctcctgagtagctgggattacaggcatgtgctgccacgcctagctaattttgtatttttagtagagatggggtttctccatgtcggtcaggctggtctcaaactcctgacctcaggtgatacacccgccttggcctcctaaagtgctgggattacaggcatgagccaccgtgcccagcccagttgtcgtcattttttgcactagagaatgtgccaggaaatgtaacaggcagacaaggaagaaccacacttgtgttcttcctcttgcattctcccacatccagcaagtgggatgatctggccacatagtggtcatacaatgtcaactaagagaagtgcctgtggttaaaagcactagcctgagaatcaggcaagcctgggttcaaatccttactctgccatttattagttgtgtggtctttggctagtaacttgtctctgctttgattattaaatgcagttatatgtgtaaatcacacagcatagtggctggcacatacttaaatactcaataaatgacattattatttccctagttctattaatcaataatataagaagctagatagaaataatgactcggaaaacccctccagatcagtgtcagaccctaatagttcccatttgcagcctgtggatttgttttgcttagaaagaggagagtaacacacttaacccctgtctatattcactgtcattgtttcttttccacctctcttttcctcattaacaataagccttgttgatagagctagtgctgtataaaggtagccctttcttttttatttatttatttatttatttatttatttatttattattatactttaagttttagggtacatgtgcagaatgtacaggttagttacatattgggagggtagacaataaggaccaagttattaagataatctgggcccaggatataaaattttctagtagaatgaaatcattgagtcattcaattattatgactttcccaataaaaacatgctttcattatatatctatcatctatttatcattatctaaatatctattcatccatctctttctgctttattgatgtaatttttaaaatgatatttaaagattcataggctgttatttccagaaaagacctttaagattacctaatacaacattcttattttctagcggggaatcccagggcccagagggataagtgtcctgcctgagatctcatagctagttacttctaagagtctaagggctctcgactcattgggagaacccacattttctacagattgaaatagaatgtggaaggcttaggagacctttctttaggtaaaggtgtaaatctgtactctgtcaaatatggaggatttgggagtctctctaagctgatgctcttctggtgctctttatcacacagtaagatttctctccctggagcctgctcattggtagattttggctttaccggtgaagcaggggcagggctggggagtcttttatttagagtgtgctaatggagtaagtgatggggtaatttggacaggtgctgcagtggggctctagctaggctgggccctagtctccccgcgtgagtgaggctgactgaactgagaagttctgaggaaatatgctgagttggtgagaaacttttctaacacatcaggcttttcctagttcttgtccatttatcgatgcgttgcgagtaggagggggagtggcagaacgatgcttccttttagggtaattgaaaagggcgagagaaggaggattttgaatgtttgcaatattttaagtaacatcctcatcataatcattatcataactagtatctattatggggcagatgttccaggcatctttctgagttgctttacatacattatctcatttaattctcacaagagttctgcaaggtagatattattcttaccattttacagatgagaatactgtggcttagaaagtttaaacagcttactcaaggtcacccagctagtgcatgtgaaagccacactagctctgtcggtagtgcttgctacatagtgaactgtattgcatataattaacttgctcataaaacaataatattcttcatgtttaaatacccaaaggccctccccaatcccccaacacattttgtattctgagcttttctttttcaaggactttactgtccacagagctgtgagatcatcatatgagtattattttaaaaaatggaatggagttttgtagtgacttaaggagatcattgccatgtagttgtacattatattcattttggagacatgtttcaaacgttacaggcgccactatggccttaatgatcgttccctttaatcgtccattttttgcttcctttggatgctttgcatgccctcactggccagtggtaatactgcagaccttctgaaggactaacccatcgctttgctcttttcagtggacaccctatcctcttcttgagtctattccaaatggctgtcttgatctttaattacaatcctccgtggacttgtcatagccaagctcatcctgcaccttcgctttgtcagctctgcactcctgtccccatcttcctcactattactcatttcccctggtgtgatcctgctgttctcagctttgagtttattgccagttaaaggagcctcctcgttggtagagccttctgttaaacctaatctctcctctgaaatcacactgcgatcctctgtttgtgtactttattttctattttgttatcaacattgagttagtatatgtagaaaatatttgcatagtgaatttgttgaaatagtatagattaatataggatatatatgatatactatcgtatgcacacatgtatttggtaaaagcctatcagatataaagggagtttagttattctgcaaagtgttttaagtcatgacttaacctctgccacataccatagtaccatgattaataggcacaggactcttaaaaaagagccaacacacacctcattagaacttgaagttagaggagctcacatagcatgaaaagatctaaagatctacattccaaaactttttctaaagtcctagataataagcttaataagtcaccttgaaaaactttacatatgctaatcacagcaagcaagaattgcaaagcagggatagctagcctaatgttgtacaagaacagtaaaatatttattatctggagagttccgtttacattattaacccacttttctgtcatttctcaagaacttctgaaattcttagcctttcaaactttggaaagacctgttttgatcttaaaacactaacaaaacagacgtgctttagcctctactttcagtttattctgctaattgagatattagtgaccaccaggacagtcacatacatatctaagggctcagccacatacttccaactgctttttcaagtccctttaatgaaggaacatacaaaatggttaaagtgaaagtgattatttcctgcgtagggtaagagttggatgttactgcaactttatctcaattttccagcttcttacagtcataatgctgggtgtaaatgtggcaatataaattagtggaaaacctctcagaccggctttgccactggccagccaagtgatcctgagcaagttctttgacctcatgatttctttggacctcagtttcttcatctgttgaaggaggaggttgaactgaatcaaaccattcaagtcttagttgctctaatattcatgcatatatatttacacaatgtgcacacattcacaaaaattacacaaagtacatatgcctttatatacacacaaatgagggtgcagcactttaaataaatgtgataactcaaacttagatcatgactcttactttacagaaatgattctttccaaaatgattcattgtatggttcctttcagtcaagactgggaaatatgtgaccctagacagatttaggcacttaattttatccaactaatggagtaaatatttcatatgctagtaattgctaaattacaacacagccttaaaaatttagtggcattacctaaaaggagacaggaagtggttgattctccattaatctgtttctctgtctcatttcagttgtattattcttcctttgtctatcgactggtatatatacttaagcaatgtttaacatataactttaataattttttctgattataaaaataacataagttcattgtgggatatttggaaaaaaaatagaaaagttgacagaaaaaaaagtcactcgaattctaacaaagacaattgctgctaatgttctgttatttccttccagcatttttctatgcattttaaaatagatgaaatcacaccgttttttggtgctctttttaaaattaagcatcacagcatacagatttttctatgttattgaaatctcttggtaaacataatttttttaggctacttagcattctgtcataaagctatagcacaatttacttaaccaccttcttactgtcggccatttaattactttccatttttcactattataaatgatgttgcaatgaacattttggtatataaagctttttctgcctgtattttacattatttctttaggaaagattcccagaaattgaattacggggtcaaaggtatgcacatttttaaagctcttgatctgtaatgccaaatggcttttctaaaatggtttgtatcaatttatattcactgtagtaatatgtgagagtgctgtgtttcaccatgtccttggccacccccctctaaaatctaaataaaaaatctttatgatttggtaggtaaaaattacactccaccgctgtgtttttatttctgtaattatgagtaatatcggacaattttccaggtttcttcattgtggtttctcttttgtgaattttctgctcatatctacagtatattttaaattctttattatagttgtgaacataattctgtgtcatccatttataaatcagataaatgcaagcccccttcttttttttaaaaaaagtcactttaagttcccttttttgctcattcttggctgattttattttcctgtatcagttcttcgaaatcattgtttaaaatagtaagttatgtgcttttgagtagatggctttcaaatatctgtggaatacatttatagatttgagttttatgtttagcttttgaggcacatatctattaaataaaagtgagattcacgtttgtctatcttttcacagatttccaggtcactgtggggtctcaagtcttaagtttttctgatttggcattagttaataatgattaaacaaataatttatgaacatttatcatccaatattttggtatatttcttcctacttttgtatgtggattatttgatttggaatcataatttttcatgttcttttcctttgatatgacaatttaaggatttttctattttattaaaaccttttttggaagtattagtttttaatgttttctgctaccccctcccctccactatctgtcttctgcatcatttttcaccagcacaggaaaaatagaaacacatgcttcttcagtagttggccatatgattagaaatcaatgtgtatgtaagccctatgaatattttattgataacagtggtgaaatagagcatgtttactattctaaaatatggctgtttagatgtaattcaaaggctgttcaaaacaatttaatcaaatttacttagataatgggccaagtgctagtcattgatcaatgctaagcaagtcaatttgaatactgaacaaaatctagagctaactaaatgattctcaaggggtcacagggatggttttggtcaggtcatcattcagttctgacttcaggttctcatccctgatgactgcttactctgtgctttgaacccacttgttccatgaaagagaatgttctttcagggagtcaggtgaattcacgtttagaacaagctttataggattcattctctacagtttcttaaatcttatatcttcctaggaggctaagtagataaccttcactctctcaaagtcctcaagggaacgatgtgatttatgtgggctgcagttagctcttgggacttttgttggtagtttaggcccccgtgttattctcatataccacaaagcttaggagactgttttgtatttacaaggagaggtgtctttctctaaggtggcagtctctgcctcacctccaccacttctgcaaagctaagtggaataagcaagctgttggagattagagacaatgggagtttagtttcattctggcctgcgccctgtttcagcttatggtatccaggaatcttgggtgctcactggccccctggatcacttagggaatctcatttattccactcccagcatagggaggataaatctagcctgtgtgatatttcattatgagaatttgaaatagtttttttaaaataatattctttataaaaggaccaagactggaaaactgtaaggacattatattggatttgacatataagcataaaatacaaattagaactcggccattgggagatgggacttctggtttttttcttcccttctgtcattatggccctgaatgaaaacctattatgagaaggttttaatttaaggatctcaccttggttctttgggacggttgtgtttcacctatgaaatttcaattcatttcacttcaacagttatttattcatgagtcactagggtggtttctttgaatttagcctccgtcatttattaactgtagaatcctgggcaagtatgattgtcatgaggatcaaatgacatgtcccaggctgagtgatggagcatggtgcctggtgtaaaagaagtgctaaggcaatattagttattgccatcatttttattagatgtatgcttctaaagggcaaggcttgtcttatgtttatatttaagacaacttagaagagtgccttttacatagtaggtaaataatttttgaatttgattggcttcttcagtagcttcttctgggtctgagcacctcttgggctttttgtggctttggtgttgacgatggtgatcataatggtgatggtgcaggcagcatttgtaagatacctataattcaccattctaaggctaaatagaggattcaattttgcagttgccagtctgacaccttttgccagcaccatggtaaatttcactttaaaaagctttgtaaactgcattttttttttcattagaaaggttgtgtggccacatttgtacagtaggtgagaacatttaaatttagacttattaagcagactgctgacagtcttaaccatgaggttaagaataaaattccaaattggcagttagatggtgtgaacctcattgcattggtggcacatctatagatatgcactaaacaatgccttacaatgaccattataggtttaaatggaattcagtggagcctgtaattttttcagggctttgaaacttagtgaagttacaagctggtcaggaccttgaagggaggagggggagaacattggtgcagggggatgcaaggaagatgttcttccttcttgaataggaatcacagtcccattaaaagaaaaatgccagagtcttggcagaaaacacagatttgcatattattcacatgcatttgcatattgagttcaagaggctctgtcttcaagtatgtaaaataaatagtgtaatctgctgcaattgtgttccaatccagtatccagggcattgcacaaatgaaatacgtaacatatttaaaaatcacatttcagaagatgaaagatggcaatcagctgaaggtggctctgcatcactaatactgatagggagcggagattggctggcttggctaatgtgtaagattggaaaagccattgccttaagaggcctcatctgcagaggaaacctgctcagatgggttccgggcccactggactttgcagcctcaaagttgtgatacccagggcactacctgtctcccagggtggaaagtctgcatggtgctcaaaggactctgccttctctgaagctgagcaggaatcacactgtttccagactgcagaccaggaatttaatttcatgggcccttccatgttcaatcctagagatctaagtgcctaagctggttcaagggacagcaataagacaaggggtgtcgtgggagaaacatataatcccatactgtcaacaagccttcgtgaagcaccccttcttctcaagaaatatatacactaagtaaaaatagtgtgagctatggaaatgctactctataccaagtcccctggttttcttctccaaccagattgctgccactgaacctctcctgaatagaaattctagtgctgccactgggcgcatggggtagtggtggtacctgtcctccagtcctccgcaaacgatcagattttgagatgctgtttaggctctgcagcttacagatccccaatatggctttcagaacctatagagcaatcagtaagagatttagatttgaggaatccctgatgtagtttgcttactagaggcggtagataggtgggcagacttcacaggatgttaaaaccaaaaagaacagagagatagggcaagagaaaattactggagggggcagtgattttgtaaggagtggcaaaacatccaggaaaggacacccattcttcatctgtgttgaaacaacgtcctgaatgtttattgtccatgaaacgagataggccagccatatagtcagggtcagcccagcaggggctgaaaggaaggctgacgtcttgtggacagcagggactcacatcctctcagtacagggaggacaaaattagagcaggaagacagtttcgatcctcactaactggagggtgccagcctattgttttgatcaggcttttcttagaagtctaggcaagatgaaatcctctgagcagcaaggctggagaatgacggtcactgaaggggaggattgtttccctgattgtacatctctgtatctgttaccattgagcgtgttagcttcctgggctcagatctacttgtgaaaattgtactgctttttgtcatttgaatgaaagacaggtgtatgccaattttgccagtgcgaaaatccatccttgctgccattccataatgccaggaggttgacagcatgatagtttcgggggaaaatgagtttggcatggtcttggggaacagaaatattttactacagttcaccttctgattccacatgctagcctttttattcattttaaggtagtcacttaacctcttgctcgtgatttgtccatttacaaaatgggtatttaatacatgcataccttgcagaggttttgtgaaaattaattaggtaaaggttataaaatagttggcagatgaagcactaactgttattaagctgggtaattatattgtgcttacttaaaatttcttcagtagactcagatataaaagcattttatatgtcctatctcaagcttaatcagtagatggcaaaattgttttatgtgcctagatatgtaatgtacaattgtgtgctgctgcataatgatgttttggtcaatgatggaccacgtgtacaatggaccacatatttgacggtggtcccataagatgataatggagctaagaaattcctattgcctagtgacgtcttaatgattttgattctgtgtagaactagcctaatgtatatgtttgtgtctcagttattgacaaaaaatctaaaagccaaaacaaataatttttaaaatagaaaaaagcttatagaatgaggatatacagaaagaaaatattttctatagctgtcttacaaaagagacagaagttaagcaattttagaagtttataaagtaaaaaagttatagtaagctaatttattactgaagaaactcttaaaaataaacttagtgtatcctaagtattcaatgtttatgaagtctatagtagtgtacagtaatgtcccaggccttcacattcactccctgactcactcagagcaactttcagtccctgcaggctccattcgtggtaagtgccctataccatttttttttttttatcttttataccgttttaaaaaatcttttatactgtatatgatatttctttttttttttgagatggagtcttgctccctctcccaggctggaatgcagtggtgcgatctcggctctctacaacctccacctcccgagttcaagtgattctcctgcctcagcctcccgagtagctgggatcacaggagtgcaccaccacacccggctaatttttgtatttttagtagagacgggttttcaccacattggccaggctggtcttgaactcctgacctccagtgatccacgcacctcagtctcccaaagtgctgggattacagttgtgagccaccacacctggcctatttttttttttttatcttttatgctgtatttatactgcacctttttaatgtttagaagtgtttagatatacaaatacttaccatcgtgttacaagtgcctacggtattcagcacagtaacaggctatacaggttcgtagccgaggagcaatagactataccacagagcctaggtgtgtagtaagctataccaacttggcttgtggaagtgcactctgtgatgttcacacaatgatgaaattgcttaacaacacatttctcagggcgtgtccccgttgttaagcaatacatggccgtatattgatttttttgggttaaacaaaattgtttctttttacattctgtccattccactcattctctttccctttctcatttctctgccttctctttctgataccaattcagctgttttattgtttgctcaactgacttggaattaggacagaggagccaacaggcttgtagaagtggctgaaggtggactgtgcactgcgtcagtcctggggctaagtccacagccactaagatagagccattgtcaccatatatttgaggacatgacacagttttcttcccattttagagggcaagcactatgtaaatgtaatacctggctgcaaagcaagcttcagaagtaaatgcctaagagctactcacccatggaggcatcagttgtccctctcttcttttcgagattgctccaaagaaataaaatacatgagatccacaaaccatcagtcttcattactcactttccataattattacttgtcctagatgagtgggtaagtataagtaagactgaaataaatccccaaagcattctaaaagcaggtcactttgactaagaattgattcattctgttagaagtttagatttctttttatttatttatttttctacttccattcatgctatcttttgccgatccttttgtatgagttctgttgaattctgtgccttgtaatcccatgcctacgtattagtcttttgggtttttttcagttttgaggatagagaaaacttttttttcctgtgaagattttactacacttcctaattacaaaagtattgaaaaatatgaatggtgggttttaaaatagaaattcactgagctgcatgtacatttataatgtatgtatttatatgattgtacttgcctgtataaatactacaaattattaaaaagttttaagaagccccttattcacatctgtgctttttaaaaaaatttgtgtctttgtttctcctgtatcattgaacggtttctccaaagcattgcagcttatttttgtaataatttttggcttgaaatctaatttgttttcctatgttaacatctgagaggatatatagggtagtgattaagagcatgcgcattagagataactgcctcggtttgtatcctagctcctccatttagtagccatgtaaccttgggttagttacttgaattttctgtacttcagtttattcgtctgttaaatggggctaatagggctaataataacatctaccccatagggttgtgtgaagattaagtgaattactatatataaagcacttggagtgtgcatgtgacatgagtactgtataagtgtttatgggtgagggtttattctgtgaacctctattgtagaagcatcatactctaaacatgtggttaagaaacactgatacccccggagctggcttgcattaggaggtttattatagaggaaggagtatggccctcaagaggaactggggagggtggtgggtgagtattgggcaggctgcaggaaccaggcagctgctctccttgtctcctttccctgctggctgcgggaactcggttctgcttctcattctttgcttctcagatggtgccatttctgtttctctttgccacctggcccttcctgcttgttcatcaatactcctctgttcaaaatccatcaccccaaatgatagtctcaacccagcagtttagtcggcctcaaaagtccattgcccacagctaacttatttagcttctaggcatttatgttccaattttcctaattggttgagcttggtcaagcacccagccctagctcaaagccagagcatgtggggtgatatggaactgtgggagcagatgatgtataggatgcttctttggaggcaatttctgtatgaactatatgaaccatggcttttaaaacatttccaattaagaaatacattgaacatcaaaccagtacatacaccggtaaatattaaactgaaaataatctttgcctttacaacacggtgtgaactgatctggtctatttcattcccttaaaaaatgctagttatgagcatatttggaaaaacactgctctgagacttgtgtgtacttggtgcattgggttgggggacaattggcttttttgcactcttctaatcagggcttctctttagtgcacaacagtgtcatctggggcgcttgtggaaaatgtagatttccaaatttatctccaggtgttccacatcacctggcctgggatcaggcctaaatattggccaattttgccaagtgctcaggtgtttctgatgcaggttgcttgcagattttattttgagaaacactgcattagatatgtgctctcaactaagctatataccgttaccacctttatttccttctgtgcatgaatactttgtctaatgaacaagttgtattctgaaagtcagtttatgagactcctatttaaaacttcagaatactacttcttttaggaagcttggtagattcctaaaccaatacataaaagccttgttaagcgctcctgtagatcttgttaccagtgcttctcagacctgattgctggtagcactgggttgagtgacagagggaccaggatttggattataggcaggggcagtgagggaagaacacaggggaagaacatttatatggaggatgaagtggacatgaaagatgaaagagtgaaatctttcacattaacggggagaaaaggttcctcttagagggcttctaaccacacccggctagtgaggaagatctcttaggaatgtatacttgcactctcaatttagagatagatttcattcttgtaatgtcttcatttagttgacacttaagtcagatttttcaccctaactgctcttttttgtggtttaatatttgtctttcattgtctataggaacttctgcatttttatgtactactgctaaaatctggaaattgatataaaatacacagaacttattttctacattgtttcccaccactaacttctcccaaattttggtgtagggaacacttttgcacaattttcctctccaacttttttcacatcttactgtgttttacccctcatcagtttcaaatctattatcttgtctgcagcatttttttatggcctgattatcttctacacgaatagctataacctctttgggaggtttcttactttctgtgatccttcactcaatctctcaaactctaaccaaaataaccactacatgtgctaatttaagtgcacaactcccttcttaagtctctactttttgagcagccaagttcatagaatgaatcttgaagcaagagtggaaagaaatatttcttgtaaaggaaaaagacaaaaatatgtatatatatacacacacatattcatgatttaaaaaatttcatcaaactggaaacggaaaggaacttcctcagcttgacaaaggtatgaaaaccctacaggtaatatcctatttaatgctgaaaaactgaatatgctacccctaagataaggaagaagataaggatgttctctgttactagttctataaaaatttttattggaggtcctagccagtgttattggactagaaaaagaagaggaaggagaaaaaaaattatcattactcccaggcaacatgactgtctatgtagaaagcagcaaaaaatacacacacacaaaaactactaaaataaatgtttagtaaggtcacaggatacatggtcatacaaaaattaattgtatatatattatcaatgaacaattagaaattgaaatttaagaaatttgtagtaacatcaaaaacatgatattcttaggtataaattttataaaatatctgactcaatattgttaaggtgtctacgtttcttaaatttttgtagattcaacaaaaacacagtcaaactcccagtaggattttttttttgtaggaattaacagctgattctaaaatttacatggcaaaaccaaaaaggcaaaacaattctggaattaaaaagttgcaggacatacactgcctgtctgtaagactcaaaagcacagtagtcaagacagtgtggtaatagcataaaagagtccacaagtagatttttgacaaatgtgtcaaggtggtggaggaagggcagtctttccagaaaatgatgctgaaacaattgtacatccatatgcaaaacatacatacagccctaaatgaacctcgactcatagcttgtgccatgtaaagtgattaataaactgaaaatgtatcatagaactataattatacaactcttgaaattaaaaatcttttagaggaaaacaggagaaaatctttatatcctttgtttaggcaaagactttctagatatacaaaatgtatgagctataaaagaaaaaattaattacactggacttcataaaaacaaaaacttctttttttgaaaggcactgttaagaaaatgatcagccacaaaatgggagaaaatatttataaaatacatattttatataaaggacatatctagaatatgtgtagaactctcacaactcaatagcaagaaaactcaattgcaaagtggacagaagatgtgaacaagcactactaaagaagagataagatggtaaataaacattgaaaaaaattttcacatcattagttggcaggagattcgactcaaaactacaatgagctaccactgaacaccaagtaaaatgaatgaaatttaacaaaaagaaagaaggaccaaaggcaggtaagaaggaaggaaaaaaagaacattcacaagactttggaaagaataggttggtaggaatggtaagaatgtggagaaactgctggtgggaatgcaaaatgggatagtcactttggaaaagtttggcaattaaatataaatgttaaagtactctaaccaataatttagcaatcccactgtcaggtacctacttaagaaaagcaaaaacatatatccacactacagaccatatgtgaacattatagcagctttattcatgatcaccaaaagtggtaacaccccttaatgtccatcaacagtgaatcaataaacatattgtgataaatctatacaaaggaatattactcagcaataaaaaggatgaagttctgatacacacaacaatattgaggaatttccaaagctattatgtcaggtgaagaaagtcagacacaaaaggctgcatgcagtattattccatttacaggatgtctgggagaagcaaattatagaaatcacatcagtgattgtcacacacaggagagggctaagggattgattataaaggaacacggaaatatttggggtgatggaaatattttatatcttggttatggtggtggttatatactgtatatatttgtcaaaaacctatagaactgtaaacttaaaagcgtgaattttaatgtatgcaaattgtacctcagtaaactggatcttaaaagattttcataaattaaaatttacatactgatgtatacataaatgaataatgtctttgtcaggcccatttagtaataacaagcttccacatttgcatagtatctttcaacttttaaactgctttcatacccattttctcacgtaagtctcacaacgctgtgaaagaggcattgttgcttatattttagagatgagcctctctgaggttcagagaggctaaatgatgtgcttaaggtcacatagtaaatctttctcgaatccagggattttccactatttctcaatgcctctttaaaaaatagatcatatttgccaattttgaaaaaaaaatttttatttgtttgttatggcttacttggcttctctttcctcctcttgattgacggggaattcctgctttggtgccttccgtttatccagacaaattccagagagcttccgagcacttcactagtcctctgccagagttccattttgtccaaaggacagatctcttgggaaagctctcctgataaactcagaatctcctacccttcaagagcattctaggtcaggaactgtgtcccttcctcttggcaaatgagacatatactatgtttgtatcttatgtcactagtttatctctgcgttatttcttcatctatctccgggagatttgtgtaagaaagactcatattgactctgcggtgaggtgacagatggcagtttagagagttggtgtaggaatgaatatatgcacaggatgatagaagaatgagtaaattttaaggtgtagatgattaatgaggtgcagaggtaaaggcttagtgattccctcattaaactctgcagagctcagactgaatcaggtatgttcctgtcaagccacatcactatctctctatgtagattcttgagggaagaggagaataggagagaagatgtcaggttttagaggaaggaaagtgtagtatggcaagcaggagaaaatgattctaatggagatattttgatgtagaatgagaggagaagccagagaaaagatggttgttggaaaatattaggatattgcatcgggtgatgaagaaagaattcggtgctaaagtagagaaaatagcagggtttgacttaggcctgaatatatattagacaaacgaaaatgacaagggcatgcgaagagcttgtgaaaatgttttagatgggtcaaccttgcagtgaggccaggcaactaggcagatggataaaagtgtgaaaccaggcctttcttctagttaaggaagagtaacttttgagtcactgactcagttgggggacaggggattggtgggtcatggttatatcctggtctagaaatgaaacccgctgaagagacaggatgaagaacaagagagaatggcccaggcaagggaagagagtagaggaagaggtgccgaaggagaccgccaggtgctagtgggccacggaaatgtggagagattaagtgttgaggtggatggtgcaatgggggaagaaacaggtgacaaatcttgtaaaggacaaccagggaaaattagaacagcagaaaaaaagcggcaagtggagttgttcatgaacatattttaagaatagagaagacagatttaagacacaaggtgaggaatagaacaaagaggatggagtaggagaggcaaaatgaatagaaataaagttatcttttttatacatactctcgtgtgcacatgtgcatgcacacctgcgcacatgcgtgcgcgcacgcgcacacacacacacacacacaaccttatacccctttgtcagccaaagcaaggcaagagaatttgaaaactgaaacaaagctgcctccagatgcgaggtctcaaataggctgtggaacaacctttgcacagcatgagagtgaacacagtaaacaggaaggcaagagctgaaggaagacttgggctagagatgagtgaagagaggcgtctgtacacagggcagttgcaggcagtagcccagggtcattgtacttaggttcatgtgagcagagggaagttttcgtgtagagaagaaaactgtttccatgaatattatttcaattgaaaacgcttcattgaatgttatttttaagcacttcagtttcttaatcattataaactggggtcttcacttctcaacagtgacagcttatttgctgtttttgggaggcagggaaggaatttccatgctgtaataagccagcctagctgatttcctaaacagctctcagaggcagctgcggtttcagtcacctaggaagctgaggataaaatggatttagcgatgggagatctgttcctcttcctcccgatcttccattgtttttggttgcatctctagcgttaagtccgagcgccagctgagcatccccaattccttggcttgccttttcagcttttctccaaacattccttccgtgggctcttgctcctggccaggccacgctgttctcattccccaatatgttttgtgcctcacttgttttctgacttaaggcagcctcatttttgtattttggctcctttcctcagataccctcggtgctctttagtccagctcaaaagctgcttcctaataaaggcatctccaggacccaaggccagggcagtccctgtgcccttgtctttatactgccttagccctctctgcggccctgacagtcctgtgttggggagtgtgtgtgcttttctgtgcaggggtgtcaggtccttgtggctgaattctgactccttatcacactttacagtgactcacagatggacacacaataaggacatgttggttcattggacttttgaggacagagggatagaagctggtgtgtgaagtcgtaagtcaagttttcagctttcaacatttaatttaaggtgggagagttgcagacatcctgattgtactccctttatctgattttggagaattctgcccatggattctggcctggcctgcagctgtgtccggcatgtcagggaggagctccatttggcctcagtggggcatggacaaggaggcactgactgtaccggcctgtcccccttgccattcctatggcgatggtggacatggtcactcaggcctgatatatgtgctattctagcagggtcaagaggctggattcagagagagcagctacttgctttcaaaaacactatgaaatgtgaagggtgaccaaattgcaactatattattactgttacaggaaaagattcacaaacagttctcatttttttttttttttactaattctaatttcttttctgcatattaagaaaaaccacaaagttaacgttatatatttctttgcaatatcacctttttattttcttgtgttgttatacggtcatgtgccctataatgacagtggttctgtaagatcataatactgtatcgttactgcacatcttctatgttagatgtatttagatgcaaaaatccttaccactgtgttacaactgcctacagtatccagtacagtaacatgctgtacagatttgtagcctaggagtaataggctatcccatatggcctaggtgtgcaatagctgtaccatcgagctttgtgtaaatacactccatagtgtttgcaccatgatgaagtcgcctaatgatgcatttcttaggacatagctctgtcattaagccacgcatgattgtatttccttatactttggtttctaatttgtatagtcagtaaaaattgattctaaaactcaattttttcatgaatcagattccgaccaaatcaaagagaagaataaaaagttagggcttcattaaccaatttgtttcttcagcaaagtcccatttaatgaccacattttccctgagtgaaaatgcactgcctttctctgaattttattttgtagtcattctaataattgcttgctatatttttctgactcccagtgcttttacatttctcattctcaaaatgctggctcccgacggttgttctcttgaaatagtcttcagctgtttatctgttctttgctgaggaccaggcacctggagaccattgctgcttacgatgctgctcagcagggcctgaggataagcagggagtagcatcaggagaggccatactcgactcagtggtggagtggtggtggcagaattcaggtcttgctttcgccactttgaatcaaagaaagcctcataggtattattgtggaactcaggaggaatctgtatcatttatagtcacagcagaacacagaagccgcactcaatttgtttaatttgaagatagttcagtcaaagggctatttaccaaggtgtggacagtgcacagaaaccacaagaaatgaactggcatcctggagctagtagcagctgggtgtagctaccaccacccgtggccccgaaggaggaaggtgggagcaatttctgaagtctggaagtaggctgtatggagccagtcatgaggagaggattgcttagcggaagctgtgaccttcagtcaagtgatacaaccagcccacagtgagtggcagaaagggaagtgggtcgggggagtcgatagccctgtcttggtcttgttcctactcatctcctgattgtgttgtctattggcgaaacccacctggaaaccggacgactgggaagtttaccatatagtccaaacaggtctgcttcccagggcttagcgcagagcggagtagacagtagatttttttttttttttttttttttttgagacagagtcttgctctgtcacccaggctggagtgcagtggtgcgatctcggctcattggaacctccgcctcccaggttcaagcaattctcctgcctcagcctcctgagtagctgggactacaggtgtgtgccactacccccagctaattttttgtatttttagtagagacgcagtttcaccatgttagcctggatggtctcaatctcctgacctcaagtgatccgcctgcttccgcctcccaaaatgctgggattatgggtgtgagccactgcgcctggcctgagagtagatcttaagtggtgagtggaagaccagaattcacagaattttaaagctggaagagacttcaagaaccagttcatttctcttatttcagagatcaggaaatagagccacaggcttgtcagtggtagaactgtaacaaggcctaacaatttcctcagtctgtgtgcctcctaccccattattctacccatcctataatttgggagaaaggagagagaggaggaaggcaagaacaactaaagagtaaagcttcaacttataataaatgcttcgaataggtgctcagttacacaggtaatgttagagggattttaacaagttcacaattcggttatgcttagttgtgtggctaactatgtacactggtaggaataatgatggaaatttatattaggaaatgtgtgattgcacctatagttggcctgataaccaggaagctgaaataatgcagcttttgttccctattgacactggcctagctacagggctctctttgaggtatagtctcaaaagcttgttttaaaccttggctctgaggtgaagtctgagtcatacttgggtgccatgttccatcagcagaaccatcctatagctcagagaccaagggaaagagggctaatttgagctcacacacatgcaactctcatataaacattgatttacacatacaaatatacatccagatacataggcaattaccaactaacaacattgacctagaaatgatccctatatatcaagaagttggaaatgatattggcgtttattgtattgcccttctgttataataacccttgagaaatgaaagacctagaacagtgcctttgtttctgatcagtggagttagagagttgcaactcattattggtctggttcattcattaatgtcattaacaaatgttcattgtgcacctaccattatgccacatgctttgccaagtactggagatagataaataagacatagtccctgcctcatttcattagggtttgcaagaaaagccttgttactagcaaaagcagtgagtgtgacttctgcctttcctgtacttctatactcctttccagtactctttgtgattgaagatattgattccaaatctgacgtgtgactattctgatgtcagtaatatgatagttgtataaaatttggtggctatttggtggctggtaggagggagggagtgaggaagtaggtgctggctctccctgggattagaatttaagtattgtttacattacccatgagattgtcacttacagactttttaaaacaacctatttctaaggtcagtagaaattgtgctaaagccagggaaggaggtgggagggcagaagttctttgactcctttctaagtaattggagtcaacagaagctccttgtctgcctctgaacagaatatattcacattcaatgaataaatatcaggtaactgcattgtgctagatgctttcaagtaaattgtttaatattcacaacaactctgtaaggtgaggataataattcccattttataaagaagaaaatgaggtctaggtaatttaagttactctcttccttcccccgcccaagataagtgtcaaagccaggtttcaattctagctctttttgactttagggccttgctttcttcaaaagattataaggatcttctaaatgatattttattacttttgtaatttcaatctgccgttttcactactatttcctacttatctgttcgtccttagctcattactctcctgatctcttaggtagcactgggcatgctctgtcacagccctctcacatgatactgtaatttcctgtttatttgtcttggccactagtctaatggctgcttggagataggatcccattcccattctgtgttggatcctgtctcctagcaggttccctggcccatggaaaatgttcaacaaacatttatcaaatgaatcgatcttcacagtgattctgtgaaggcagtagttatctcacattttgcagataaaggacttgcagttagagaggtaaagatcgcacagcaaattaagactaaatgttaaaagtgagtccattaactctaaagctttgctctctccattacaaaacaacatgattattattgcaaaagaggctttgtggagggatgcggtggcttggaatatgtctgggctacagagcagattgttttgggggttggggcttggaaatagccttcttcgacacctacatttcattttattttttactttttatttcttttgagacagagtcttgctctgtcaccaggctggagtgcagtggcgacatctcagctcactgcaacctccacctcctgggttcaagcgattctcctgcctcagcctcccaagtagctgggactacaggcgctcgccaccatgcccggctaatttttgtatttttattagagacagggtttcaccatgttagccaggatggtctcgatctcttgacctcgtgatccacccaccttggcctctcacagtgctgggattactaaaggcgtgagccacagggcccgcccattttattttattttttttcttcaacttttattttaagttctggggtacatatgcaggatgtgcaggtttgttacataggtaaacttataaatgggagctgaacgatgagaacacgtggatacatgaatgggggaaaaatacacactggggcctgtggggtggggagggagtgggggagagagagcatcaggaagaatagctaatggatgctgggcttaataccaaggtgatgggttgatctctgcaggaaactactatggcagacgtttacctatataactcctacttttaaatctcctctagtgcaggctgttcatctgtagctcagaacaccactgttttctgggtagatgcctataggtttggtggtctgtcccctattccctgctctctgtagtccttccagtatcttcctttgactccttcccagttgagattttcctgctgccctgctcctgtgcttctccttttatcatctgctcattttcactgcccgtccccctcttaatagatagtgacaagccaataatttttattaacacttgaaaatgctattttgctgttaaaccaatacacacaattgccctaatctgctgccaaatggtaataatcagaatcaggtttcaaaaggtttggatttcagcagtgcccacactgtccttggaggcctataaattaattataattaagaactgcgtgcagatattaggagaggaactttgagcaattttgatgtctgctcttgcaacatattaaggaaaaaagaaaaacccgtgagtgtttgctgctggtgagagtactgataatcatctacgtttgtattacaaatttctattaaaatgcacacatgtaaagtgatttataatcctttattagttatctgtacaaaccttgtatcaagaatatgggtgacagtagaagtgatacttctgctttgtgcatacagcaggaaagaacagctcagatagaaaaacctggcttgagccactggaagtgctgtaaggacaagaaggagcccaggtgacaggtctggttgaacgaagaatgagaaggctcttactcgggagaggttccaggaaagatgtagcagaaatattgctgccaagagatccagtatcacctttgcttttggcagtgatggggccatcttcttctaagggtctacaggagctggggggcttaggatgggcgtccttacctgcattatgtaagaggacttgttggttcatctgctggctcagagatttggataatcaaagcctatgtcttttccctctctcccatctatcctgctcttctctgatcaaatattttccaagaaacagctttaatgaaggttttgattttctgtttccattatttatgtggctgtaatatgttgaaatccatttggggttaattctctgcaggactatatttaggtgagtaaattccccaactccaggaccaaggatccctgtttattgtcatgtgggtcactcaatgacaaatgaattgggcatgtatctagcatgtccagggagatatttctttctccactggtttcacaggggcacagtctcagcccctgcctccatgccccagactctcaggatttcttaccttgctcctttctgaagaaagagcagggcaagggagctcaaaagcttgaaaagagtaacggatgatggtaatagtgtgagagggaggaaaataacagaacacagaagtgtaggttccaagtcaattcaaatcaaagattggtgccttttatgtgttatttctacagacttggatgatatttagtagtttagcagacactaagtgcatttagaggattgaaattggatttttaaatgccctgaatatatagatgccatttgacaaaaatagatattggtcttctacttaatagtgatattgaaaagtagatgtttgtcatctgtgatactcacatttcctacctcagatggttgatgaatgcatgtattgcctaagctaagcattctgagtcaagatcacttctttggttcaacatttgccctgcttctctagatttaaatttagaaggtataacttaaaactttaattgacttggaacttacaattcttaaaaatgtattaattaaaaattattttggatctgttctgcagaattgagtcaaccatacttcttagttcatagcacagtttcattataggttcagataaggacattgtgtttaatagttctttgggtacttttatcctttcttatacattttagaataaatttatagcatttcttttaaaatcttactattattttgataagaattggcttgaaatgatagaaaatagaacttaaaatactatgatatcacattcatgaatgtggtatatggttacattgtttgggtcttctttcaaatcttttaataaagttttcaaatttttgctgtagaggtcttgttaagacttttgttaattcctacatagattacagttattggatgtacccaccaggtaaaggctgacgatctcttgatttcctattatcaaagagtgatgttttatttgtttgttttaaacacaatttaacatttctatcatatatatttcccttagtcaagtatgttatctgcatttttctgagatattcatgtaaatatctcatttagttctttaatgtggtgaattattttgatacatattctgaagttaagccattcttgcatttcagatataaaccgcaattgatcatggtgatgatgattactatttaaaaaatatactgtgttttagttagcactattttttttttttttttgagtcggagccttgctctgttgccaggctggagtacagtggcatgatctcagctcactgcaagctctgactccgttgttcaagggattctcctgcctcagcctccagagtagctgggattacaggcacgtgccaccacacccagttaattttttgtatttttagtatttttagtgatctgctcactttggcctcccaaagtgctgggattacaggtgtgagccaccgtgcctggccactaatttttaaggttttttttttcctttatgtccataagtggaaggggtttataataatcttttcttataattatctgaatctagaatcaagctttccgtctttttctttttgttccacttatatgagcaaggctcgtttccttcttaaaagtttgatatacttaatctataaaaccatctgtaccacttttgcttctttttattttggcagaggtggggtgggctggtgggatgattgggtgggaagtggaggactagggtagggagtagttttgtcacattaggggtgtgggctttaataacaatttctaaaatttctaaaacttaattcaaatgttctacattcttttcagcccctttccctatttgccatttttattatatattacacattaaatggaaaagtaactagttttcataatattcattatttcaaaatttctattatatatgttattttctctttcattcgcattttctctcctttttttttttgattcatcttgtcaggactttacgtcttttaaaagatcagttttgttttttgcttttctttgtcttgtgtttcattcatttgttattttcttgtttattagggttgactgttaagtttttaatgcagtaagtgaaaacttaattataattaatcatattttattttcttggtttcttataaatgtatttaaaagtgtatttttctctgtaaatgctttaattgtgctctagaaattctgacatttagtatttttattgttattctgttcaaaggaattttagtttcccttatgatttcctttttaaccttatagttatttaatcacaagttttttttttttaagattttggatatgtagtatttttagtacctttaaaaagtacttttaatttaatcacattatagaaaaatgacaattgatttcatattgatttttttaatctattgatgtatttttgtagatttaatatttttcatgtatgtacttaaaaagaacatctattctctgttctatatacatttctaggtatctgaactagttcgaacttataactcatgctttaaaaaaatcttttatgtcttagttaataagatcttttgtcagttggatttgtctgtttctccccatgtaaattttagttgttgccttatacatgaaaagtctatattttagcctcatatgtgttcataatgattgcttcttcctggtacctatatgttataccacttaatgtcccttttgatattttttgcctttgaattttattttgtcttgatattaaaatttcgatagatactaccactttgacctccaaaaaggttatactcgtttatactcttcttgacttccattgtatgagaattattgtttccccactctctaatgtgacatattttaagcctatgtctcttaactttctgtctttattggtagcttggaaaactggacctgatacatagttctggcatcttaatcttaacttcactcactgcctgtcatattccagtcatagtctccttaattgaatcactccaaataatgtcctgactgcattaagggatggtgcttggaatatttttgacttaattattgattaagtcacattttattcttccagttgtggttgccccaggactcagttttctaaggacagggttggcctggcttctcacccagatgtatcttccctttgagcctgctctgagcctgctctgagcaaagtgtagactgtttcctgctatagttaccctgtaccagttaccagcatgaagataagctcctgtggccttctgtttgctatggatctcgggatcacttagcccaagcttcaaggaggcaaagagccaaatgagtgaacagtcaactctctaatcctgctgctttgttgctggtccttctggtgcaccctggtttctgaattcatggcatgatttcgatatgctgagctccactgattcccaatactggccctggcctgagtgattattgaattcatctacatgactagtaagctgtcagtggaggtcgctgctaccccgaggccattatgggacatcttcagggagttatatcgctcagggaactaacatcttttgccccatgcgcggttcctcttaacattcctttcagcctctgtctgccattctttcaccctcacctcccacacactcactttgtgctatcataaatagctaggctccttgaacagcttctatagaagcttaaacgtaatatcctttggatctgtggagtattttagattattcaaagcacttccatatacatattttcatttgatcttcacaaaaatctttcaggtatgtaggttaggtatattatcctggtttcaccgatgatagcatagagatggtaattaggtgactcgcccatcctcaggcactgtgttaacacagaactggtattaaaacgtcagttggttttggttggggatttcattcattcattcattcattcactcaacactcatattatactgagaggccccagaagggaaagagcaagggctttggagccagacaaacttgggtttgaaaattgatgtcatcccttattagctgtgtaatcttggtcatgtacttaaccctcagttttctcatttgtaataaaaggaaagtatgacttacaatgtttttgtgagtatctaataatgcatgaaatttacctggcaataataatatctggtacccagcaggttgaactatttgactagcaggtcaaaaatggtcaaatattaacaattttatatggttcaacctaatggtagaaactcagtattggccaccatttattgagtccttccttattgcatatgaggcactgttagagctcaagaatatgaataaaagtgaggaaaacattttccttatgggtctatgtctgtatcttctgctagaccatggtcctgaaggatagaatctgtatctgttgcatcctccccaccaaaaaaaaaaaaaaaaagaaaaaaaaagaaaaagaaaaaagttctctaggttataagtgctcaataattactgaattgaaaaagtccctgctcacaaggaggttatcaactagttaaagtaggtggacacatcatcatatattggtaataaaagtttatgtgtatttagatagatacatgcaggctatggtgagagcccaaaggaagcaatgctcaattctacagggagagcaagacttcctagagcaggtgcatcaagacttatggtctctgtgaggaagggagcaaagccactctgcttatcttggactacatgctttccctcaatgaatccccttttaatgttggaaattgagtttgtattcaaagtagcctctttgtctcacagcccctctgctactgttatctcccataatgtattgctttgtaaagtgctttgctgtatcctgagtataaatgagatgctctgtaaaaccagatgctattctttgggtgtcacaactagccactgcatagccaaatataatatattgtgtgagacaagataaaggaacacaagagatactttagagagagcaaataaaacatcaaagtgggagagtggagtgcattaaagttaaactgtcacggcagagtgggccacttttaaacgtgaaggaaactaatttagtgacttgtaactgtaggattagaataccattggaatgaagttagcttatagttttgccaaatggtaaatcttttggctttccttgagaaccagtcattggaattgaactgtgtgtgtgtgtgtgtgtgtgtgtactttgtccacagctctttgtggtgtcaaactccttctgtcttcctctgaatatcagtactactcaattgcctatctagtgtttctttcctttaagttctgggaggaggaattcaggccctgtttctcctgctaaattgtgtacagcccatcagcaaaggtttccagggctcatggagtcattctctgttttcacagagacactgagatcagaaaactgtcaggagtaaactttgctcaggcatgaaccactgagctactcatcttatttgtgagagagagacaaggcaatcaatacaggtctccttcttggcagtgttgaaggatgactataccagtaaaagttccaaaatgttttctgccaagaactggattggattttgtgcttcttcagccacaaaatgtccccagcatcttgctcccaaatcattaatgccctttgcagtcaagactgactgctcaactcgaacacttccttatctttctttattcaatactgtcatgattagctaatctctcaacacttttagatttttaatctctcaccattttttttttttttgaaacaagcaggagatctgaagcagcattttcaaccttgattgtatgctctctctctttgtagaagaatgagaatctggttttggttctggttgcagtttgtagagtattgccttggagtattaaaatgctgtgtttatgtattggcatgctggtgttataatgccattgaccttggataattacataactgtgttgagcttctgtttttctatttgagaaatgggaataaaatgtctaatttatagagtgtccatgaagatcagagagattatatatgaggaaatgtctaacacagtgtgcagcatataaaagatgtacaataaatgattctttttaattttttatggattcgggcagtaaatatgtgcttttgttacatggatatattgtatagtggtgaaatctgggctttttagtgtagccatcacctgaatagtgaacactgattatttaaaataaagcgacataagcagaactagttatattaaaataagaggagctcttggagaataatgagaagcatagagagagatggccaaggcttatattctatagagcattatgtccttagtttgatgcatagaataagatttagggtcatatgtggaagtaaaaaggaaggagttctttgtaggtaaaaggtggcaaattatatgaaaatacggtatcagtcattttagggaagtcacgactataggatggcatcaggaaaaaaaaaggaacatttttcaaatgtggctctaacattacttcagctgctaatggtatttgtttaagtttctgtattttggtgtataaatagattggagtaatatgtgttccttataataattggttatatgagaggcagttccacgtagtgtaatagaacacatattggaatacaaaagtcagaagatctgggttcaggtttgtttcacttaattgattggttcatggtcttagaacacttagcttctctgagccttggcgtcaacatttataaaaatggtgataataatgtttttcttattttattccctactgggtcattgtaaggatcaattgaggcaatgttttaaaactactagtcatgtatcagttgttcttgtagtttaatattaagagccagatactaacaaggttactaaagaattttctggctgttgtcctcattgaggcaaacataaggtgaaggcagcaagaatgcagggcttgtgtacttatagccccccacatccagtttatccagcccatgttctgttgctcacctctgctgagcacgtttttctgctcactttgtctggccttgctttccttcagcccaagaacagtacaagggtgggctgtaacaggagggccaggagatttgtgtatgcatactcgcatggctacctggaccactcacaacctcttttcctcctttgtctctgcctgtagctgccaatgactatagcaatagcaccttttattgccttgttcaaggatttctgaggcttttgaaagtttcattttctctcattctgcagagcaaataccagagataagagagtaggctggtagatggagttgggtttggtgctcaatgaaaggagataaggtccttgaattgcagtatctagcctcttctaagacaggttacgtgatgtagatcctattttaacatgctctttctttgtgtttgcagggagtcgacgagttgaagatgaagcccagagcggagtgctgttctcccaagttctggttggtgttggccgtcctggccgtgtcaggcagcagagctcgttctcagaagagcccccccagcattggcattgctgtcatcctcgtgggcacttccgacgaggtggccatcaaggatgcccacgagaaagatgatttccaccatctctccgtggtaccccgggtggaactggtagccatgaatgagaccgacccaaagagcatcatcacccgcatctgtgatctcatgtctgaccggaagatccagggggtggtgtttgctgatgacacagaccaggaagccatcgcccagatcctcgatttcatttcagcacagactctcacccccatcctgggcatccacgggggctcctctatgataatggcagataaggtaaaaaggggctgcagggagaagggcctgagggtttgtgctgaggactaaaccatgcatttgttttcctgtaaaacttgattgttaatgatggaaggtaaccagattgcattgacagcgtggataggccagcaattaatcctttttttttctctctctctctttgagacagagttttgctcttgtcagccaggctggagtgcaatgatgccatctcggctcactgcaacctccacttcccaggttcaagtgattctcctgcctcagcctcccgagtagctgggattacaggcgcctgccaccacacccagctaatttttgtatttttagtagagacagggcttcagcatgttgaccaggttggtctcaaactccttacctcaggtgatccacctgcctcagcctcccacagcgctgggattacaggcgtgagccaccgtgcatgcttagcaatctgttaaagatgaaagtgagggaaaggtgctggtatctagaaactcctatagttttgaaaaggtttttgtgtccacttgtttgtaaatggactcactgaaatgactaagggatgttgacgcttgtagctctgggataccttttcttcaaataggtatatgaaaggcatactctgttattctttggcaatacgtgttctcccccatactgttttcaagactataaaaagaaaaatccctcaaggcaggtgatttctctacttgaagatacaaatgtcatagggaaataattcttgccaaggtattaacgctcatcacacatattgatctgcacatccagatggattttaatccgtggaacctgtagcaacacatttttccccatgcttagatttgaaggcaattgggtgcacattaaaatcacctgaagagctttcaacactgctgatgcctgagtcccacccctcgggattctgattattggcctgggcttcgggagtcttaaaagctccccaggtgattctagagtgcagttaagattgacaaccactgctttaaatctccaacaaatcctagcctctcctgcgttaatgttaggctaattgtcatatgactaattgccacttgacactggggcttattccctaactgcagaaaaaagcgttttattctgctttgggttgttttgtttttacatactatcagttattcagttattttccttgctttactgattattgttcattacttagatacagcacttagtacatatgcactgtcctttgcagccagccattcacgtcttagaatagttagtttcaccacaagtgctacgtttatcatttttcatcattttgggtttctactattgtcattgtcatactttttatcaccacattcaaacctgcctttagttttgtacttaaaagacatgctttcgggttaataatgtttgtaaacaccttaaaacctagcacagacaccacaagcatgctgcctggctagttgacaacctccgcagtggagcagctgagccgagactaaaggaaccttgcatgaccgttaccgccacctgtcggcagcaggcagagatgactagcttctgcttcagagcttcccttcagtctaggaaaggtcaagttaaaagtgttaagtgaagacattccagtatcatatgagaaacatattcttccatttacgtgggtgcaggtacagatgttagaaaataggcactagcacaaatagcccatgctaagggaagtgggaaaaataagcaaaatggaaaatgtagactgctgtggcagaacccgttgagttgtgcttcaggtagatttttctttttttcaaatatgattgtccttagcaaattatattttattttaacagtggcaatttgagggcacaattttgctttgaaagaattctgatatggttaagagcgaattttaaaattaccatgaataagtacatatctactttgagagcacaacaggtaaaaatgatttttttctcatgtgggctgttgtgcaacctatattatttctccctggtagaaaaagttatgcctaaactagctgattgcttctctctggtaccttttacaaatccacaacatcattatacaaatataaggtaacttgcagagcatgcagagagactgaactctttttttcgctgatgtatcttaggggctttgagagtgttccccatatgctaggcgcttagtgctgtgtatgtactatcttatttaatactcttaaccagttagcgacctaagtgatattatttaatctttatcttacagatggggaaactgaggctcagagaggttaagtaacatatccaaaatgctacagctcttaagtggaagccaggattttaacattggttgctagcttcaaaggctgtgtactctcttgtctctcaagaaaatgactggttaaggtctcatatatcttactacccttcactttctcccttgttagatggcattgtgggggatgtcatctgactgaaagtgatctattacatgatttataatcaggcaatactggagtctaactacaagagaacataacaagggtatgaaatggtggagcgcttaagtgtagcacagttccatagaggacccactggctactgccttccaggagtaaataggagaactgacaccagtaaagtgaattcttctaggtcactgtaatgagacctcctctcatcactttccccttgctccttccttcattgctaccacacccaaatattccatcatgtctttctctccgccaaataaggaggtaggtgggcagtgacttttagatgcttttctaaaatagcgtaaatatctgacttttgacctggaaagaatagtttctaaaaggtaagcagcaagagggaaaagaagaaagaaaaagatccagtaatggagatcctggaaagttggaggctcagccccaggcgttcgatgctgaatgggtggtggcaggagctacctggagagagagtgccagcagcaaacttcccagcagccatgcagaggaatgtttgggggcttaacagatttgcataaaggccaataaaaagagtccccaaatctcagagaaaaaagcctttgggacaaatttcaaagataaaacacctcaaaactaaggccaggttttttttttgttttgttttgtttttttaatagaagtttatttttaagtaccatgaccatattttacaaacatagaatggggacacacagttggacaactattaatcaacaacaggggaataggacaaaaaacatttgaaagtggaactgatgcagtaaatctaagacatgtagcttggccacactgaaggctcatagtaatcgtctgaaggatgatcaataagccttctattttgttctccccttctcggagacaggtaattgtcagtctgttttaacttaagtttttgttgttagtttatttccaataaaacccacttattaagtgctcttgtggatgattgcattacagggataaagtttgtattcaagaagtttttgatgctggaaggacagcattcttctgaagacttttgacaacagcacagacacagttcagcagttcagcacctcgtcaaatagcatgtgctcacttttttgcatatgctaattaatcagtaagaacattaattagcactctgctttcccaaagaggaaatgagctttatattatggtggaaagaagcacgggggctagctgagtagggctattaaaaaatcagaatttagagtccaagctggattcgggcatcacttcctaaatgttagaatcaggacaagtcaccaatccctgactctcaacgtttgtttccttgcctgtataatggggatactaatatgttgattacagggttgtcgaggattaaatgaggtgatacatggcaagtgcttcactgaagtgtccagcctaacattcagcaggtgaagctgaaggccatgtggagcagtttgaagggagtgagagtgtatcatgatgcaggaaaagaatgagaatcgaaaagcagcatggaccattgtagaaaaaactctaaattggagaccacccaagaagggcatatggttgaaaggtgaaaatctgggggaaggctctgaagtgtgaggtgggagtcttggtctcaccccaccagggaagctgaggctcacaagtagtatggaagcctgctgcagccacacggggtcccttaaagaaaatctctaacctggaaagaactgctaggtgcttgtaacagagactgtttcgaatagtaatggagaatgtttaaaaatgtatgaggtgctttttggcagttccccacctgagtataaagagcctattttattttgccttgttataattgcttttattctccctgagatcctggatttaagatgcccatctgaatccaaataatgaactgaagctagatgtatttccatttatttctaggaggtttttctactgattgtctgaaatcttccctgggttttcagattttagcttagaaaggttaagtaactaatccaggatatcacagcccactattagcaatgggactagaattcaaatctcaggaatacctgttttgaaacctatgctttctattatacaattctgcatcataagacactgaactaagaattatacatccctgagttttagtctccattctgatgagctttgaaaatgtggacaaacacattagttatactacatgatactcagtttatagtttatgagatataaattttgtgttctgccctatacaccttacattttgaagataaaatgaaataaaatatatggaagattttagggcagtaccgtggcaaacagacactttaggtgagggaaataaggagtagtgatagggaatgacagagtcaatgacaactgttttgtccttggcattaggactaatgaaaatggcttgagcagaaggtaggaaggaaaatagaaaggtagaagttacagtaggagcaggcaaaaggattcaagatccaactttaatgctccaagaatggggaagaaaagggtatgctgagtaaagggtcaggatctggaaatagacatgttgatcagggtgtagcatggtagctaaaacgtgcatcacattctggatcttattcttccttagatgacatgcaaaaatattcttactgtggagtctattgctatgattctttcctttctaaattgcttctttgggggccaggcacggtggctcatgcctgtaatcccagcactttggaggcggaggcaggcagatcaccctaagtaaggagttcgagaccattctggccaacatggtgaaaccccgtgtctattaaaaatacaaaaattgggcgtggtgacgcacacctgtaatcacagctacttgggaggttgatgtaggagaattgcttgaacctgggagatggaggttgcagtgagccgagattgcaccactgcactccagcctgagtgacagagcgagactctgtctcaaaaataaaataaaataaataataaattgcttctttgggaatggatgctttcaatagcacttttcattttctgtactgagagccacattttggaatctaattggggataggaagatggccctactcttctttggcttcatcctctggccctcttcccctatcctctacccccacttgcttaatgacagtgggtttggagagagtagatgggctggcagtggtgtgtgacactgggagtagactattgccttcccttggctcatatggatttgcatatccaacataatcttgaaaccaagatggctacatgttactcatgccttaccctacgcttcttcactaatttctggtgtctgttagattgttaccttgcttttagttgtctgtgatataatattcctcgggacagaatactttgggagaaaactgtaatgttatggcatttcttggatgaagggtattaagacatagaggtaggaaaagtgagaggaaaaaaactaacataatatgtcaattttgaaccaggcatgatgttaatgagcattttaattcttatgcaatcccatgagggaagtagtagtatttcttctttcttgatggggaaactaaatcagagagcgtttatgtatgttggccaaagtcacacatctacaacaatagtgggactgaaatctgaattcagacatgcttgactttaagactttttcccagtgcatacgatgagggagtaagaaaaaaaagccaggacaaaattacctggagttcagtttcttctctccaattttccctacttgaactatattttggggaaagatgggtaggcagtgctctctaaggcactggaaactttgtagtgatgtagctctgtctggctggctctttccacctgcttctgtgaaatgtgtttcttgttggccagcacatcctgtctttaaaaattggagctaggattttctttaggagcagtgttaatgcttgtaacaattgaagcccagaaattgcttcgacattcatagaaatacaggcacttggtgctggaaagtaacacaccagccatcacttgtcatacattttccagggacgtgatggtgtctaaaagaaggtaccagcacaaggagagaatgcagactttggagtcaatgggcttgagctctattcattctcagccatgtgaccttagttggactcttcagactctctgagcctcaaaatctccttctgtaaagtgaaaacaaaaataacacccagcttataaagggtagcaagccttatgacgcaatgtacccagtgcatggtagacagttggtgcttagtatatgccatcttgcattctcaaaaaccagacttgtcctaaatcacttgaggaaaatggattctaatttttcctattaacagaaatagaagatttggggatgttaacctgcttccatttagacatggtggataaacaacagctcagtaggttccacctctttggtgatgcaattactgatattgacttgatcagaacttatcaggattttcaaagcagagacataaagtgatttcaacaaactgatacacataggatataagcattaaagacaagtcaagatcattttctaaaaacataacggaataaaatagtgtttgaatcagagtcactcatagatttggaagtgttaatatgttaaaaaaaagtgaattattacatgaagaaaatattcgtggtactaggtgggaagtagtaaaatgttacagatacaagaaaacataaatttactaaatattgccagccaatttttacatcacattgatattgctgaaaaaaactccctgaattatgagttctatacaaagagtatatttttagtcccctttctgagacttctgtgattctttttgtcttactgttagatctacattttattcaaaattgtattttgattctgtagtttaaaggtctagcatgcaggagagtaacattaaaggtggttatttttattctacctttctgagtacaataaaggtttattgctataattctattttacacggacaaagaagatctaattattgtaagttattttgaggttatgatgagaaagactgacactgatcatttattttttgtcaaactctgagttagtcactttatatgagctagtcatcttatatattttatctcatttaatgttttcattgaatttagaaggcacatattttatctttattttagagacaaggaaactatagatcagagaggttaactatgttgtccaatacctttaggtagtgatttgctcaccgtagcttaaacaaatgagtctgtgggtgtctcagaacaaagagtctagagacagaggctgctgggggtggttcactggctcagtgatgtcagtactgacatctggggttcgcctggcattttgtcatggttggaaggtggctgctccagcgttagtcatccatcatgctcatacttaacgaaggaagaagaagtgggttggtattggattagaagaagtcttccccacatccttgatttcatgagcccaaacaatgtcacatgggcaactctgtggacgttgcaagtctctctggtggaggtgacaaggggggaaaggagtgggaatggctttggggctagtcaacagacagtgtagtcaacagacagtgtagtacactgtgtctcaaaggaagtgacatcctgggaattcaaccaatgcctgtaggaatcaaagcccaaacatggtgcatttcccttgtctcacgccaaaccctcttttgtgtctttagtctagtcttctccagaattaggatcttggttcatcagttattttctttttttcttaactttcaacttattcctctctactggtatcttcccttttagggattcttagaagatgtttgggaatgtatgagggtgatttttggatgccataataactggtgtgtgtgagagtgtgtgtgtgtgtgtgtgtgtgtgtgtatgcacgcgtgcgccacaggcactgagaacttagagaaccggcatgttaagtggcctgtaatatatgtgttagtgtcccactgtcaagaatagtcttacccaaaatatcaactatcactgtggcccataaatatgctcaaatcactctcatcttattaaacaaacatgaaagctttccttgatgctcattctccctccttgtctccttcttttcacagttcagctccttaaagggtagtctgaaattgccttttgcacttcctcatctctcacttctccaaggtgccaaatccaatggacttttcaagttgttcttgaccttctgcagcactgaatactgttgacccttttagtgctagtcacaaaaattatgatgacaagagtaattagatttgtcacagatttggtgacagcagcaatgagaatgtatagaatttagaacatgggtgggtcatataggtggaaatgtctagtaagcacttggatttgggcctggaggtagagtgaatgatttgggctggacatgtagctataagccttatttgcggggacaggatagctgaaaccatgagagtggatgagatggctcagagtgaacagtggaaaggggagagaagtgggtcaagggcagaaccctgggtgcaccaccatttgagggatggccaggggaggtgcaaggtgcagatgataaaggatctgagacaaaattatcagagagataagaaaagaacaagaagagcaaggaaggagaagcattatagaaaccaagagttctaaaaagggagttatttctcagtctggaaatcaacttagagccctcccttcccctccgacagtaacgggaccttgatagttccaccttcgtaggtagctccaatttgtcccctcaactccatacacgctgcagtgacccaagggctggcactcattctctcttgtctgtgctgccacatggaagcttacctatgattctttggaaactcagatctattattacttttttgcttaaaaccgccctggcttccttcagcttagaatgaagcgtcctctttaatctggtcccaggccacctctccaggatttctcttaacctccctgcccttgagcagcaatgtcaagccacactaaattatttacagctccccgaatggttctgcctgttttacatctctgtgcttttgtctttgccacctcctcttcttagaatgtcctcttccttgcccaccccttgtccactttataggagaattcatggcgtttcttctgtgcacactttcctgactcccaccttcacagaatttggcatttcttttcttgtgcgtcacctgtgccctcttcgtgcttttattgtaacctgtcttgttaacacatctgtctctcttgctgtagagtaggctcattgtgggccagggctatgctttagtaatttcgtcttcctagcacatagtgtcaggtgcatagtgacagctaactttgattaaacaattaacactcattaaactgtgcactctatacacactgcactgggtagcatggtgatccttcaaaagataggtccatgtcttaacccttggaaccataaatgtgaccttatttggataaagggtctttgcagatgtaattaacttaaagatgtcatgatgagatcatcttgaattatttgggtgggccctaaattcaatgacaaatgtccttataagacacagaagaggagaagacacagacacagaggagaagcccatataaagagagatagaggtggtagttgttgagctacaagctaggaaagccgccagaaactggaagaggcaaggaaggaatctcccctagagccttagagtgtgagactcccgacaccttgattttaggtttctggccttcagaactgtgagagaatacatttctgttgttttaagcccccgagtcttctgcagccttaggaaatgaatacacacaccacagttaagtgagggagttctggaatctcactgccttgctgtttcctggttctatcaccacttactgtgtgacctttagaaaactccttcacttctctgagccttagtttcctcatctataaaatagtgatacaaatagagcttttgctctctcactctctgtctctcttttctctcttttgtctcttttctttctttcaacagggtctcattctgtcacccagcctggagtgcagtggcatgatctcggctcactgaagcctttgcctcccaggttcaagtgattctgctgcctcagcctcctgagtagctgggattacaggcatgcaccaccacgccaggcaattttttttttttttttttttcagtagagatggggtttcaccatgttggccaggcaggtctcaaactcttgacctcaggtggtccacccaccttggccttccaaagtgctgggattataggtgtgagccactgtgcctggcctagaccctatttcttgaggttattaagtaagattgttcaaagtacctagaaaaggccttgaaaatggtaggaatcagcaagtatgggtctatgagagttatttggtaagtctccattgaataaatgaatgaagtaaacagaaacacaaaccatcaacagtatgatcttgaactcacctagctctgtggtcattggacatgcagtttgggtgttctctccaaaggtgatgctctttctagttcactccaggcctgggacaatgctgaaagggtgtcagtgttccctttagctgttccactaccgaggcccttggtgggactggcaaggtgaagttcgtcttttagcactagtgtttccctttctgcatgcctctctccttgttttgtttttgctttttgcttcttgttttgttttgttttgaggtggagtctcaccctgtcacccagcctggagtgcaatggcactatctcggctcactgcaacttctgcctcctgggtttgaatgattctcttgcctcagcctccctcatagctgggattataggcactcaccaccacaccgagttattttttgtgtttttaatagagacagggtttcaccatgttggccaggctggtctcgaactcctgacctcgtgatccgcccaccttggccttctaaagtgctgggattataggcctgagccactgcttctggcatgcttcttgtttcatgtgcatgtgcatgtgtgtgtttaagtgtggtgctgatatttttctactttccagggcccaagtggtacatctcctctagggctgtactcctcacccaaggtcctcatgccctcagatattttttcttctctaccatcagttcaaaactcctgtttcttttccctttatttcttttcatttcatacatagtccatatcacaactgtaagtaatggtagtagttcttttagttctccgtcctgctagactacagactttgcaagggcaaggactaggtctttatcatttttgtatcaccagaacctaacatatagcttgtcacagagtaagcccttaatacatatttattaaatgtatggatgaattaattatttcggggcagcaaatgtcagttgcaattaagagaaaagtattttaaacccaaatgaaaatggctgataggttaatctctgtggttactggcagatacattcctacgtctctctgggctgctagctctatcacctttcccttcctcacagatatgagggccagataccagcaatcagcaacctggcacttccagctggagttatcacatttgtgtccactttatttttagcagacagacatggcaaaaggcctgcttcaggttaggggtgccatctgaggtagcagagcaagacttttatcatgaaaatatttaagtgccagtgatagccctgactttattagcgctctttcaaaagagtgagcagaaagaaacagttttaaatgttttggaaaataaacatatgcaattcatattatatgctaattgtcaaggtatcacccaactatatttaatcaatgtaattaacttttcaaaggtagtaacttcctctccaaacaacatactttctcagttatttattcacaaaatatcttttatctactgggtattaggaactatttgaggttctggagatgtgatcagtaagagagacatgtcctcatggagcattgactgacagtaaacagacacatcaattaaacagtattattttggatagtggtgaatgctttaatgaaaatagcagaaagaggtattgtgagctattttagttagggttgtcagggaaggccgcagaggaggtagcccttgagattttcatggtgagaaggatcaagatgcctgaagatctgaggggcagcattttggcagagagaacagcaggtgtgaaggccttcaagtgggaaagtgttttggttgctgttgtttcttgatgagtaataggagggtcagtatagctgaggctgaggaggtgctccggagttggctgatatagggcctgaggtattggcagggtgctgtttttttattcattctgggtgtaagaatggggccatgttacctgatatagtgtcttttcagatggcggcagtatagtatcgtggatggagcatatgccatggagccattttgagttctggttccacctttcagagcccggtgacctcttgccacgtgtgatttctgtgatctgttttttttttttttttttcctcatctctctgttgtggttaatactcttccacctcaaagaactattatgaagattaaatgaaataaccttttaagtcactcattactctgccaggtacacacctggttttgaataaatggcttctgttatctactagtattgaaagacaaattcctcttaaaagaaaaggcatccttttcttttgataggtgtattatgcaggttttgttttgttttgttatttttacaaaatttgtttacaagcttgcaaacagttgagcaaagcaatggaggaagttagatacattataattggctttcctctaactaaatggctgcttctccttttgagttcttggagtttccatgcactagtgtcccttgactcctcctggatttgtctacctagttgcagctgaatatcatttcctcccttcccaaagtggggtggtggcactgagaagagtatcacagggaatgctgcatctggggtgagcttctgaggtatgggttgagagtggaaggtagcacaatggtgcagccagccagggtagcctgtcttgaactgaggattcctggcatacccccaagtcctcatggcctgccaccacgtgtcttgggtgccttctgttgccttggcaacatgtaatccagagtagtagggagcaagcagcctttaacctttcagcatcacgttgctagggcaacaggcttcccaggaagccaggctgcactgtggtttctgcatgctgcttccacccacccaccctcctcctcctctgcctactcttatttctgctgtcttccatctgcatcgctccacttcttttgccttcacagatctactgtctgcataccccttccatctccttccaacctctttgccttttattcttaccattcctgtattctcattgcttatatcaaagcaaatattgtaaattctcaaaaataaaacagtttgacataatgagctgagaggatggtgagaacgaaggagttaaaaaatagcaagaaagagagaaaggagcttggtagaatttatagtttattttagtgtatggtagtggttgactttgaaatcaacaggggagattttattttattattgttattttaatagaggtactctggcctcatacccaaggatttagatttaataggtttggagcaaagccctactaattactgtttttataaacttcccagtttgagaaccactggtgagtagaacatgtcatgttgtttaggttataaagtctgtgacaggtcaggctctatttggtgagatttctcatcatggtttccagtgcaatgtcattgagtgaatgcttaataaagattaagaaggagaaagaagagttggagaaaaatgaaaagaagctaatggagatgaggaaaggaaatgaaaacagaagggaggaaacaccatgaaaatgacaaagaaagtcagtggaattagagacgctgaaatccaccatcagatgtcagttcaacaactctcttgtctctgatattcagtgggagtgcaggttgttaagggtcttaacccagaattgattaacatactcttttgggtatgttttgaatcctggatttgccctggttgggaggagagtggggtgggccaaatttggagtttcagaagaggtcagcttcattttattacccctttagaaaaaccaaatgcctactgcatttctggtgccactctttatacgaaatggtgctttgcctgcactgagccaatttaaccttcaaaggagacctaggatttagacagtagtattattctccttcttttacagatgaagaaagagaatcagaaaggaaagcaactggcccgcactattaatggcagtgtggaaactagaacacttatctaaatgacagtgaagtccatggatttcaccagtatgcttcactttattttgaacacttttatttattcagccctcctgggacatcaagcatttagccttggagtaataggatatcccagctattgcaacaggggctaactggagcctggcaaagttgacttcctccctttcccagttgaccttgattaagacctaaatattcagaataagggaatagccaagggagagacaagagtgggatgaaagacaagaagtagaaagggaaagagaattagagaagaaaggatgtagggtgggcaaaactgtcaggtccacccccagtctgatggggcctgggagctgcagctgcatgggaattccaattctctccaaactctagactctggttgagagtgaacctgagaccttcaagcccagaacactttcaactggatgccccaggatttgatcctggatcagctgaaactcttcaataaccctggggattgggggaatttttttctgtaccatggtgtgtgtgaggagaaaataaaattgagtgcacatcagtctaaggtctaggattccatctcagtagatgagaagttgacaaggaagagagtatcctttcctcactatcctggatggcgataggtcttagagcaatcttttccttcttacttcttgaatagtcttagagaatcagctgtaattgctgttaccacagaccaaaatctttaccagtcagtgttggtgttgcccaaaggctgtttccattgtccccctcagcaccctcccatagttcctcccattgctggtccttcagcatctattgtccctattattttcccaggataatcagaggcttgcttatctgcaagaggggtattcaggtgtttggaagatatctgtgtgagcatgatgggacagatatctaggcgggctcaggcaatgcatgagagaagtaaatttatcacacagtgtgcaagccctttctagagaaagagagccccttggtttccacccctcatgactgggacaacacagagcacacgaggtgtgctcagtgtgtatttgtcggtaatgatagattctttgaaatcagatgggaacaggccatatgctcttggaaaacagcctacattacaaggtgggatggatgagtgagatgtgtttttgcaagttcttttcatctctaacatctgtgatcctgtgaataattctcttcccctaggcccaagctggctgcttgcctggggtctctgccagaacctttcccccaccgcccctctgaatggaggtcatagagagtcttctgttctggaaggatggctctagaagccagagttgatactgaaaacaggaaataaggtctgaagcctggagtcagagcccaggaagagaggaattggggcaggaagtgtgagtgcaacaattcccaggaccaagcaggggagaagtaggggaactgatggctcagaccaacattacctgaagttgtccaacggctgtgacagctgtaggtccagttacactcatataagccacggaagctttgctctggccaaatacagggactggctgagtagcaggactcaagaccgggctgctctgcagggtagaaagagagcagcggccagagtcccagttcttgtcctgcttgcctgcttgcctgccatgtcattttttccagacatctaaccagcacatctgtatcagaagaggctgatacagacgtgaatgccctggtctctcatcactgttgttctccaagaacaaattggtgactaattttattgaggaaagtactatttggggtcatggaacttcacccatttggccctgcagtttctgtgcccgaggagaagtctcactggtcaatgaaagggaagacttggtaacccagcaagtagttactggtgtcatttcagttcttccagaagggaaaccagttcagtggttgttatgaaaactactcagcaaagcagagagggggataaggacaccgttcagctttctagatgctctaggagaagagcactttctctcacgttggtgtattccactcttgtgctctgttgggttcaagaaagaggctaactagtcattgtagtgggggcttctgaagctgttaagagttggaagtatctggagctggctttttgtctgtgggaggaagcattagggcttgaaaagggtttttttgtgtgcttctggaacttccaagtagcaatcatggccactttgtgatcttgatcttgatggtcagttcagggaaaagttatgcaattggaaaagaatctacttttaaccattttttccttccttttccatgttcttttctgtcatttgacagctcctacctctaattctccagtgccttttttctgccctttgcctgcccagaggactcttttcctgcttccctctgctcctggcactgctggggtttctccaggaagtagtgttcgattcagtcctgggtctgtcctccacgtggccccagaatttcctcctttcagtctgtaacactaagtccttgccagggtccaaatagacaagagcaactaacgggtttccctccctaggggcatttgtattctaacttagtgaaagaagtttgtaatagtggaatttcagataccccattggaccataagggaaatatgtattttaaacggaaggtactttcctgatggccacagattccaccgtttgtggggatcctctctgatcctagcatgaggggtggctctgctgggataccttgctgcaaacagaaaccctgaaggggagctgcttgaggagggtgtcagttgtcctcagctgagcaggggactgtccatacctgctctggagcctggagagaattttgtctattaaggcagaaggacttcaggacctgctctgggaagtagaagagaatctggcagaggagggaagtccacataaattggtgaactccgacgatttatggaccgttttaaccatccacactacagagagggcttaaccctactttctgcactaagaaccctcagctgcttttccctgccctcatggactcatctcagcctgcctgtgcatgcatccttctttgtttcttcccctcttggcttctctgattgttccttctctctgtcctcctttctctccttgccctgctccctgctctccatcattgcatctctggttcgtgtctctctgcccttctcccaccttgtcctcccccccatctcctgtgacccactgttccacacggcttctaccttatgtggtacacgcagccatcatcgtgcttcatcctgtcagtgctgaggcccctctgtagcctacctttggacctggcattagttaaaagttcccaggtggtctgctcttgacttttggagctatcaaacattagctttattgtctgtggccagttggttcagttggttagaacttagcatgtaatgaggccacccaaggacataatgccctatctctgtgggaccttgtagtgctcttccatcccacggcagagattccctccagcagccaccttccccatccatatgcttggtcatagtgggggcctgggtgaggagctgtagctaatttattgataagggatatcaggaataataatataaattttttagattaaacattttgttgtgagatcatcatagattcacattttgtaattttaaaaattgaaaaagagtttgagctcaatataatagatagaattcaggcccagacagacctggactgattctggctctcccttattagttctatgttcttagcctgcttaactcttctctgcctcagtttccttagctttgcaataaggaaaataatagcaaccgcgacacgtgtttggcctcttttaaccttcctctgcctgcactcctttctctttctctctcgctcctgggtctattttgttatactgctttctttcttaattgttttttatttttaccaatgttcctaggaatcctcccctcctttctcccaattttgtgcttctctttccattttcccgactcttaaccatttccttattttcactctccaactttctcatttatcatcacctcactgaatttttactgccttcgcaaatatgtttcctcattcattcctccctgtcattcactgtttctgggcccttcgtggcttccgggggaatgtgcaattcttatttatttataagcatgggagaataattacagaaatgatttaattgctttttcacatagatcctacagcactgactgagctaaatggtggtggagtcgaatatcagcaggcagtctcaacacaagaaaaagattggtttgggtggatttgaggtagagatgcaacaataaagtctatagaagtctcaacctcatttgtcaaagcaactgcgaaaaatatgcaattattcacaactaggattatataaaatggaaggtatatgtcaccaatatttgaaatagaaggaaagagagtagggctaatatttttaaaaataatttaagtcttatgggcaatgtagcggatggtatgctgctactcgctttttagggctttattcttctttggagtactccatagggttgaatggaaatattcattgcatggtgtagatgttagagtggaaagagcctaaactaaactaccaaatcaagaggtctggttctcatctttgctttataatccatatagctgtttgactctgggcaagtcccttaatctttctttgttcttcatctgaaaataaaggggttgggatttacaatctattcaagaagtttctggtatgatgtccatgagaagagaatgttgagtgaaggaaaggtgagtgaataaataggtggaaagccatcaaaaatgcacagggttcagggtgagtagattaaagtaaacaaaggaaatgagcagtggtggtaaaatctgaagatgtatgatccaattatgaatttttaaactgcatccttgctgacagattttaagatttggcacataaaaggttgcaaagagaatgttgaagctctttacatgcagtagggaaaggaaagggaattcctaataaggcacactctattttcatccccactccactctattcctcacccctccacaaaaatccagatgaacatgttatcttactacatggtatcaaagaccatcaaggttggaagggatcttagagactagtctcatgcccttattttacaatagaggacactgaggccaagaaagattaagtgacttgcctgaggccacatctcaattctctcctggagctggcctacttttccagattaccagatcagttctagtagaactttaaagtcaacaaaataccagtcctctctaatagttcatagtctacagataatatgatgtaatgaattgctatctcttctctctcctgattagaggtgaggacaagggcaaactgaaattaggactagggtagggagggaggatatgatattttaatgtggtttgagataattgattgaaagtatattaatgaaatatattgatattgataaaagttaatattaatgacatttggggctgtatatagtagaaagcctatatattagagattatatgaacttctgataatcgtaggcagacagatggaaagaaaatttggataatctaaattctatttgggtgagactcttcaatgatcaaagaacactccagaaactggtgtgtcccaactactcacaggccatagatagttcttttatttcctccaaatgtggcaccctgaagtcagcccctttactcctcatcttgaagcattcttctaatgagctacttaggaaagaagtgctcaagtatgcagagaaattcgtgtacagcagaaattcatactggaaaagcagggagtcttccagaaagaaaggaaaggaaaattggaagagagaacaggaaggaacactacagtacatgtggctggaggtaggagataaagataacaaaatattacctttcatgatgttttacagttttcaaagtaaatttatatactttaccttaatttgatactcataacgattgtgcagtatgggaaactgcatctcaaattctctctctgaaaagtgaagatagctattgtcactatccccatcatcaccataagtctctgagaagttaaatgatatgtcaaagatggagaaatactaagtggcaaggctaggactagaatgtaggtcttctggcccctaagttaatggctgcaagagaagagaaccatgtaagctacactgaagagtgctgaatggctatgattgatgagtggtgccatgtcagcacaggggagtcaaatggaatgcagaggatttggccacggaattctttgtagaccttggctgatggttttctgttaaatgaatagctttgatgggactagagaggatgaagaagttacttaaagggaagaaaaagaagctatgggtatgttaacagtgcatgcttaagggcctagacattgattggaaaggttgggcagctatctagaatgaggaattcataggcccatacagaggaatggacccatacagaggaattttaaaataaggagaaggattaaacctcagtttagtgaacaaaaggcaaaaccattcaagccaaatatgaccaagttaagtctacagcctctcaccttatccgtcccctcctggggaagaaaaagagccactattaaagccttttaccagagtactcttaaatctgttctgaataaagctctaaatgggctgggatggtttcccttcattaacacttcattaagctttgtcagatataagcctcctagccagatcctggcaagggactctcactgaggtgataatgaggagaaaaggttttggcctactccagagctgttgaatgtaggctaaaatatattttgataacattggtattaaaatgagtattaaacatcactttaccctgggtggtgtaaatagaatacataggcacaaacagaaagagacaagcatgccaatataacatgacacatttcaaagagatttggtgattggctggaaacaaattgttaaaatctaagtcatgttggacttcacaaatgatgggatcttgatagatttgcaacgtgttcctaatatttttaaaaatgcctctttcaaaaacagacataataattgtacatgattcttagaatgttggtgcttctagccctaaattgtcttctgactgtttaatatttatcaactaccagctgttcttagaattaaattgtgctaatcttctagtagcttacctacgctcctaaaagtgctgtcacactgatttaatatcctgtgaaagcctgaaggtgcagacattttaagaaaaaaaggtatatttaatctttactttgaagaagcttctgatttggcctcatggaaaaattatgaaattttgtgaaaatattataaaaatacaaaaattataaaaatattaacacagaatcaaatgggaatgacccctaggggtacttgatgcagacacagttgtctggaagatcacactcatagtaatcagcaatcagatgtcaaccaaaatttggaaagtgagtatttgtgtgtgtgtctgtgcgagtgtgtgtgtgtgtgatgtgtatggggattcaggagaacataagaaaagccaaaatggtgtttttgaggtggttttcctgggcccagtgttgatattattgtttttaaaaagcagtgttttttttttttttttccccagtgtagcaagcctacacattctgcacatgtatcctggaacttaaaataaaatataaataaataaataaataaataaataataaaaaattttaaaaagtaaaaattaaaaaaaaacaaaacaccgcaaaaaattaaaaagcagtgttttgaaaacaataagattttctaaaaaaaaaaaaaaaaaaaaaagaaaaaccaatcttcacaacattccaatgagcaactaatcagaaaaggagttggaaaaggaagactattatgtatggagcccttgctatgtgtaagagctttatatgaattatctcgttataattctcctaattaattttgccatcacttcactagaccccattttcaccctatttccataatgaactgtagaagttagcctacttttcaggtttatttttatgcaagaagtcaacattttgataatttcatcaaattatctaatgattagctttttggaaagtggtctaggattagttttactcattcagaacatcctttatgtgttagatgtggtacaaatcactgagggtatggtgaagctggagaaatagatgaacatgcatagtgttttaatcaatagtggtatgcagaatgcatcacaaaaggagaaaatggcacagaaattagatgaggaagattgaatttgagcaaccaagatctgggggacgatcatgaaaagtttgcggcagtgagctacaaaagccgggtgtggtataccttggacattttaagggcttatctcataggactaagaaaaataatgcatatcaaaactgctggtgatgttgacacctggtaggtggttacccacctacgttaattgaagtgaaaaatgaaagcaaataatttaaaacagaagtctgaactgtaacataatgaaacccctatgtggctgaattcacaagatacttgagtggagagtgtcatattgggatatggttatacgaagctccctgatgtcccatgacccatactggcagtggcagtcccttcgtcaagcctcctttttggccaagagggaaccagtcttggtggggactttgctccttccaggcacacagcctctattgccagttgcttagaggagaggtttctgatttctcaatttgcagactaattattttataatgatagtggcagtggtggcatgatgtagcacgatgaattgttatttttccaatttcgacttttaaaaaatagtcctataccatattttttttaaaaaaacaaaggatatggaaactacaaacaaaactaagaaatatatgatctcagaataaagaacagtcctttaaattgaatacatctcgctgtgtcaacaacccaatacattgtttttatttttctcatttttctgtgggccagtgataactttatcatggattgtcattgatccatgggctagtgtttgggaagcactggtgtagatattgttgctagagacagtgtttccaaggaaattgcttctaagagctgtggatcgagatgcgtcccctgaactgttaggctagagcctgacaggtaagggctctgctcgtgtcttgtttctctgacagaaattacagcacagtgaaaagtgtggcactgaggtcctatgggatatcatcatctccagcagtgacagactgatgaggttccgggattgcgggggaagtgatcaatgtactgtgtcttgactttagcgagccttttatttctgtcccgtgtgacatattcatcaataatctgagaaaatagaatctacacaactttctggttggaagtttatatcaaaagtgtggtacagaggtaagagggcttatctgagagttagaaacactgggttagagtttaggctccggcatggctagctgtgtgatcttggataaatcattcattaggtctcagcttcttcagccatacaatgagaattgcatctcctggggctcatcaagttgtctttagtgttacaaaacccaacataacttcacatttatctacaactaggctgcttaggctaagaaaaatatgtttctttgctttgagttaatatcatgtcatatcattgatgtacaggaatctcatgctgctccaatatatatttgtaaaaagaggaaaactatgattacttaataaacacatggctatagggcgttattcatactcatagtgaggaacaatttttctttacttcttgtttctgccctctggagaatggagctgaaggagttcttatatttttagaaatatgtaaaaaatgataggacaaacaattcagggctcagagagaacaccaccaccatcaccaccaacaacaaaaaactcagagaatgtagcatacgaaagataaaagtcagctatgtagtagtatttttggaaccaatcaataaagaaacatccagtgatttttagacaggtaaaaggtagaaagtaacctaactggaactgatcaggtactttgctgtgtgctttattttttattttattacagtggctatattatttaattgcattatattaattaacatatgacattaatgatcttgtttttatttttctataatcctgtgaggtaattattattactcccattttatatacaagaaaactggggcccagagatgttgagttgttgtcaaagttgtccagcaggtaagaggggcagccaggatctaaatcaggtatctttgtctacgaatcacaaggtcccctgcactgatacattcatttactgccacctcctaatgcacagtaagcatccaaggcacgtttctcagccttggaatttttacctattttattctgctgtttttcctttcaacaaaatgaccttgaattcctttccagctccatgtttctagaatgcttggatccctaccgaatgaacaaaatccagagggagtgaagttggccccagtgatatggagggctgggtggggcagaactgagaggcacaggctgaaacagagcagtacgttacgcactgtagtggcatgcataatgccctcttagagatggagtgaaacacacctcaccctttgagttacaagtggtttgatccctcactctaaggtaaactcacttgttctccttctagctaggtggggagaaacattacattttattccaaaagattcacgtataaaaatatcccatggtttctatatgggataaatatacatgcatatgcgtattttctattatggagatttttttatgtccattgaatgagcttactggaccgttcaataaaatcaaagctttgacctggttatgagtcactaaagaagctgaatttttatagtcaattgatgctgttggatggctttagtacacacattgttctcggttctttgggcctttcttgttcctgtccttgtttctctgagcactgtggaccatggtggcatcaatctgaggcgtgcagtcacaagacctttgtctgacacctggggcttccgtttgtctctgcctcttgccagctgcatgaccttgggcagatcactgaacctctctgagccaaagctgctttgtccataaaataatggatgatgtaatgactgaaatgagatacatgagagtgcttcgttgagctataagcactgcacaatcattaggtattgttcatattctggctagagggagctgaaaaacatctcagggattttcaccatgacgattgtatgtgtggttacatttcactgattgaaccactttcaaattttctccaactggaaaatattctagcccaacctctcctctgtgtaagtaatcatggtaaagctgcttctgggctccatcactctcattcaggtacttcttagccctgatccaacctgtctcccttgttctgtggatgtctctgcatgttatgccatataattaattttagatgatagaaaatcagcctgccaggctactgtagagatgacggattctttgctgtagcttcattcacctttctgcacatgtatgcttcacagtgccagagctgacttaacctcagagtgtgatcagtaggtgttataaacagaagagtccttggtggcacctcttttgccatgtgttggcagagtgaatgggtgaatatgctggcaaaaaaagtggttcaggcactgggggccttgctaaatgactgctatctgatgagctccctggtggagtgtttccaagaggggcagttgtcagtgaacatgagtatgtgaatgctggagtgcctggaataatacgtaagaggggaagaggcagatttatgctgctttgcatcagcagggcactgggagcaagctggtagtttcctctacacaccaccctgaaatacagatatttcttgggcaagacatctggcttctccatccactccccttcctcgcccttcctattagattgcttccaggccatgttagaaattctcctgtgccacacctgagcatcagtgactgctgatggaatgagtgttttcaccctattaatccttgaagaggtgacaggaaagggaatagataagatgggggggtggtggggagaaaagacagacaggaagagacagatagtgtaggaagtggaggccagaaggttggcgctgtaatcagaagaggccattgaagtaatgtgataaaacaatgcatggataattcagttatttttaaaatgcaggttattcaactgaggaaaggagagagaactaggaaggtaagaaaggttacactgaaggactggggtgcttcggatatggacctttgtgttttcaggatcaaatggatttagactagggttttttcctcagagaatgaagcatccaagggaatatcaggggctttaagggtggaaaatggaccacgcaggtgctttgggccgaggctgactgtgcttcaggctttgtcttgaggagaattttaagtagtgtttgttaaacacttcttgttttcctttctcattttcccatttgctatttacctcttattctttcctgtcctcatccctccgatatgtagccttttgcacatttaattttggtaaaaatggatggttttacatttcctcttgtaactctcttctaagtctttacatcccttggtaattcatggagatccaactagagaaaaagcaaaattgcagtcaaagaatgcatggtattttctattaaacaaatatttaatatttatttgcatttgttagaaacgcagtgtgcccatggccgctcctagggaggcagggaggtaggagcttctagctgttcacagatttccatcagctataaccccttcctctccccacaccatagcagccatcccaaataaatacacatgttgaatgtagatgtgtttgctatgtggtgctgcctcagcacagctgctgagccctgccttttgaacagatcgccaaccccaagcccttctatttggacatcctgcaccaccatcgagaggaaggccatggttaaggacagtgaatttgaaagtcaaaattggttttgctggctcctgtctgtgtgaacttaggcaatgacttaaccttttggaacttcaggctcctcactgttaaaacaggaataatgccagccatgtatggttaacatagaaggaaatgccttacctcactaaacactctgtccaatgcttggctgagaagggcgcccttctgattgccagcctgcaaatgggccaggcaccatgcctccctcccccacagatattttatgcatgcctcccaacaatcctgtgaggtagagattgttgtacaagtgcagaaatgcaggactcagggggactgtggtttgggccaggacatgcatgtgtgaagtggtagaggaggacatgtctcagagaaagatctgctcttggttggaggagatagggccaagagagggtgtgttttgtgggagaggtgtgatttcctttagctagggatatagtgaagccccctaaaggccttgaggcctctgccttgagtcagggccatacaggacagataagatggactcattctgagttgtgggatgtttatggaatggaaagtttcagagagagcacagcagagcaagtggaaatttcagttttgtgtgctaagaataaatctatagagaaaatgatttgatgtaagccaatgaacaaaaagaaagagagagcccggggatagcagtgcacccatctgcttctattattattgttgttgtttagctaagagaagaatgcattctccattccccgggccgtacggggctcatcaggttacctggacacctatgacacacaccacttctcacagtggcatctgagtgtgccatgaggcatgggaccatttgcttctccttctcagcttctggcttggccctcacctgctggagctgctcagctcacagggctctgtcagaagatctccaggtcccaacagaagagaaaaggggaaaggcagagcaggcaaacaggccagaaggactaggggagagacttctgaaagaaaaaagagacaaagtaatgtggaaggcaatgtgattgagaactagttgcagggtgaaatgaatgctgaacattaagtgcataatttgagtaattaatgttccagatgggagaacagttttatattcttattcctattttccaaaggttcagagccacgcagaaaactcttccctgaattgccagcatcactggcttgatcccaaaggaccacacatggcataacttcatttaggcatggtttccaggtggcttttacattttttgaataaataaaatgttttttcttcccccttaggccagaattcctaaccagtgttccatgcatggttacaggtgtggccgaataattgctgtgctcagccctcaggactgctgggttcacttccccaacggcacaagatcacatgcccgtcaagtctcctgggaaaggcctgagtatggcaggcaggtttgctgtggggctggcagccctggaaaagaggatgaggagtactgggctggcagctgtgtggctttgggagaatctttctgaagatacaggttaactacatacaaatgcagtccccaacctgcccagatcagagagaaaagatccagttcaggacttgcagcttcgctgtatgaaatttctcttgaagaatggctgggccttgggcagcctctccctctggccctcagcaggcttcagggctcttcctcctctctcaaacctcccttacactcttttctttcttcttcttcatagttgaactatttaacatgatgtttaaaggcatgcctggctgccttgtggagattcagagttgccatggcaatgtggcctgtttctccaaattaggacatattcctgctggctttcttttttttttttttttttttttttaatgtgctatgttttccctctcatacaactcctgtgcctctttacatccatccctgcctttctccctgagaatgctaatttaagtacctgtccccagaactggagaggtctgaaggctaaagggggtgccttcctgatgttctctccaagctcatccttttccccattgcacgtgggtctatgtctgtggggctgccatttccgtggccttctgagagccctttctgtgaggttttctcctgatgcctgttttttttctgggctgggctggtagcaaatgaatttctgttttacgtaaaacccttttgtgaatggcaagaggtaaggaagagacaactgtggcttggattttaaatattatttcccagaaacttcttcccaggcacgtgctccctttaggggatgctcacaagatagacaggattcaggataaatgagggtgcatgcgcctcagctttttctgtaccactcattttaggatcccaggaaaatatgaacttcaaatcaagaaagctctgtaatctgagggtaaggacaaaaactggtcaatgttttaaaaaaagaaaaagagaaggctgtgggatggaggcgttcctttccttcaggattatttctgctccatagattgtagatagctctttgagccagttgaattacagtctgttataaaaatggggaaagaaagagaatgagaaaagcaagaccgatttaactctcctgtttcttattttaattgctggtgctctgtccttggcacatgaaggccaattagagaaggctccttggcccacacttagagcagagatgcgcaaacttggctgcactttggaattgcctggggagtttaaaaaaatacagatgcctgggtcgctcccataaagagtctgatgtaattgtttcagggtgcagcttgggcattagaattatttttaaatgctctccagttgactctaatatacagaagttgagatttactggcttagatggtgattgcttttggaagacagaaatcatggcttccaaatgtttggctataaagtggctatctctgaaatccttggacaaaaggcacaaaattctcagatttaattcattcacaccttcccctctgttccctgcatattcacctgtgaaagggccgaagggagagcaccaagacaattagccaggtaaacaagacaagagttgacccagggacgaggtccactgcagccagacagtgacatgatgggaacccaggcagtgtcagggctgctgatatgtgggcccagagtgggaaataacactggtgcagtcacatgtaggtcaaagatgacaccctgcattgtaagtgaaacatgacgtggccctttgatgtgttgctggagcttgagctaaagctgctggtggaacttcctgtggacagcctcttctagttctagaagttagctaagagggctgggcatggtggctcatgcctgtcatcacagcactttgggaggccgaggagggtggatcacgaggtcaggagatccagaccattgtggctaacacggtgaaaccccatctctactaaaaaaaaaaaaaaaaaaaaattagccaggcgtggtggtgggcacctgtagtcccagctactcaggaggctgaggcaggagaatggcatgaacacgggaggcagagcttgcagtgagccaagattgcaccactgcactctagcctgggagacagtgcgagactccgtctcaaaaaaaaaaaaaaaaaaaaaaaaaaaagaagttagcaaagagactactgtgttttcaccttgcaccttttctgtaggcagtgggcatgtgtacatcacgaggcagcaagctttcaaatgacacacttttgaccacattcagaaagcatcgctggaatgaccttcatttttttttcatctgtaatcttcattagggaggaatcctggggtagtaggaaggacctgtgatacctgctgtgccattaacaatccgtggtactgtggaaaagtcccttatgctctggggccttcatttctgcatctgtaaaatggggtaggaatgggagtgaagtgggggctgttgagccccttcggttgcaaggatgttgtttgtttctatcagtcccatgtttgcacctgctgtttgttaaaagttacctatcaggtggcaacatgatgacagcctcgttttaggtcagagtgggagataagccagatagtaggaattcaagatgtggagtatcttgggctcagaggtccttcaggaaaactaatgagaacacacctgaatttgtaacagaacacattctcagttaacttaaagaaccagacttgggaatcagggaagggctggagagcaaaactggaataagcaaaaggccaatatgcagaggagatggaggggaagaaggttccgaggcccattgtgactgtcctaagccaggttctagggtattcatctcctcgtgaggaccaggcctggcaattctcctgtttgagtacctacctctgagtggaaggattgaaattgtgagatgttttagtgatcaggcatctttctagttcaggttgatgatatacccatgagttaatacaagtctacatcctctgtctactttcagttcaggggatgataatttttaataccatatcatatgtcatgcactgtgctagacactgttctcaagaagcttccaaccactgtaataagtactttaacaatgaacatttgtatatcatccagtatacagagccacttttacatgatccgctttgttcctccatactatttattcatgatatgttttattcatcagaatgacgattttttttaattaaaatatatagtgttgatgtgagtgcagggaaatagagactttcataatttcatggtaaacatataaattggagtgacctttgtgaagacagtttggcaataaaagcctcaaaatatgtatacccatcactgctattcaacttacagaaattgatcctatgacaatgcaaaaatatttacttgaaaggtggtcatcatagcattagttatcacggtgagtaatttgaaacattttacatgttcagtgatgaagggctggttaaattaaattatggtatggatgataagcaaccattaaaaatcatgttatagaagagaataataatgaaataggaaaatgtcatttctataaatacatgaaaaaggcaggttaaaattataatcaacaaatatttattgagtgcctgctgtgttcaagacactatactagacactgagaatagggtggcaaatcagacagactctagacttcaaactcccatccagtgggcatgaggggtctctactctgggaggttttattcagtagtagtgtggaaggtgtacactctcgaatactatgtttgatgtggtatatttcagaggataagggtgagatgaggaggaatacatgtttgtactatgaagatgtgagcatttaaagcagattacatatagacaccaaaataatgttatatctgaatgaaaagtagcacagatgatgtaaatgttcttctgtatctttttaataattctttgatttatgagcatgctttataatgttctcataataagaataaatacgtgtaagaagaaacatagttcttagaaagttgctaaattttcatggactctattttcatttgtaaacaccacctttctttaaatttatccttctacttctgttggccagcaccaataaataaaaataaacttacaaaaacatgctaccctgccccccactgcccttcaccaccaggggaagaaagaaaagcccatctatatatggaagcctgtattttggaacagacatatgaaagtgtttcttccaaaggcacgttctcctgaaaagatgatagaacactaatgaaacacagggtactgcttattgtatttattttgggcctgctgatttgtttctcttaagaacagtcacattaatatttgtttctggatatgtcagcacacagtgtttataaggctgaataagaaaagagactaaaaacctttcaccaaggaggcggccaggtctggcctggtgcagacaaggggcctatgacattggtctagagggaattgtgggtggcagttaccgggctcccccacatgagcctctttttcttcttctactgtccttgcctattcctaacgtgttccctttctcctactcaatttcagtccctttcaatccatcacatttattgagtgttgcttggtctggcattatgctaatctccctctccatagcccttggttttagtaacctcttctgtgactccatgcctgttgggcctgagctggcatcttctaggggatcctagaagagaggatcaccagcagttaataaacactgagaattctcccagctctgtcattgtcatttggggcaacttagaatttacttgtactggttctatggagaatcagaaaattaacttgcctgctgtcttagttcatttatgttgctataaaggagtacctgaggctaagtaatttataaagaaaagaggattatttggcttacacttctgcaggctgtacatgaagcatggcgccatcatttgcttctagtcagggcttcatgctgcttcctctgaaggtggaaggtgaaggggagctggtgtgtccagagaccacgaggtgggagagcggaagcaggaaggtgcaagactctttttaacaacctgctcttagggtgactttcacagcagctaatagattgagaacacactcattgccttgaggagggcaccaagccattcatgagagatccacctccatgacccaaacacttcccattaggacccacctccaacattggggatcgaatttcaacaaaggtttggacggtcaaactacagcacttgcatttttccatatgtacctgtgataaggcagggcagatgaccacgatgttatatgcattgagatttttcctgttaggccttatttcctcttctcttgcagaaaaaagattctttaaggaatattcaggcagaaatgttgcccgtgaattaagcctgctttaacagggcttttgatctgtatgtatgcctgatgctatcttgtggcttagtttcttagctggggagggtgtacatatatataaaatgtaatatagaacagatacatattttgtgtgtcaatatatatacacagatacatttggccttcttctgataagatcttttaaagataagctaatatgtgtgaaagaaaagctaatgcttgtgtttgctccagagaatattaggacatttgtttttttctcctactatgtttgctatagtttctctatgactctcatgttcattaagaaatgaaagaaatggtatctctgggtatttctgcaggatcataaatctagaagtcatgtgttgaaaaagacttatttctcaaagtagaagcatgagtaccttaaccttatttgtttcagtttttgcagtactgatagttttcttagctgaaagagtctgtgtactaacaggttataatacaattcacaaaaaccatattattcaatcataacaaaaagtatgagtttactaactgtgccctgcttttgttttgggttgctgcccaagttataatccctgaccttagatacatccttctttaaagtcccctgcttttgtcaaatatctcctatattcagcttgttaacagaactcatttttgatgacacagtgacagacaatctctgccttccagatagtgggtctcaggtgctttaaagagtggattagaactgccacacagactcttgttccatcctcccagcccctcctacccctactgccttacctgccagctcactttaccacttcactcctttaccttctcacaacatgttgggaagaagaaggagaagactctttgaggcaggtcctttctttaagtcagagagctgtcgtagggactccatagtataagcatggagcaactgctttgataaaagtcatctttctatccttctctctgaactcaggaatatcttcatctgagaaaggaaaagaaaggttttctgaacctaaacaggtggacttcccaggacttcccttccctcccacatcaccctcttagaaatggacattgaagaggattccaattttaatttggataaagataaatctcaaatactcaaccaagacttagttaacctgcattatcattgggtcttctcaaattagctgttaggccagggctgcagatgataaagcaggagtgggagcaaagaaagaacaattagaaagacagggcagtggcaacgttaagggctcaattcccgcaccatcttttcttatcaatcgaggtcacaagcctatctctatgttctgaattttcattaaaaataaacaatatgtaactcaacacatattgagtacctagtatatgcagacactcttctaggtggtggatattccggagtaaatagacatatcttagatctaatggcagttacatcttctgctctgggagtggtcagataaaacacatcaataaacaattattttagacagtagtaatttctattaagaaaataaaatgggatcttttaatgaaaggtgattggatgaatagctaatttgtattgtgtgttcagtgaagccattactgagaaggtaaagtttgaaccgaggttaaatgacaagaggatgccccctatgtgatggcctcttctatggtagaattaccctaggaagggttaacagcaaggtgaagggctccagtatggaagtgtagagcagaaagcaagcaaatgtggctagaatatagtgagcaagggaagattgatagaaatcaaggtcagaaaaaaagacaggcaccagataatgtatatctttctttagaggccagggtaaagactggatttaatttcatgtgtaatatgaagccactgaaggtttataagcaggaactatatgatctgatttgaacattagaaacaaaaattgtgatactttcacttccagccatgagggagtgtggcaatctgaaattaccctcccaccataaataactagaaaattggaagggggaaaagaaaatggctacttttagacattggacaatgggtagcacaggattattattcctgagaaaagaaaagtaaggtttttctaggctgtttacctggagataattccaggactgaggttcaatgaggagtaacccagcaatctgactgagttgaggagacagagatcagcatttggggaggataaggcatgagagttttgtgggatggaattcctaaggttagaaggagctccggtaatatgcgctgggttccttttgagtttttgctcaaatctgtgcatattataggtgaaattccatgtctggacaaggttactttctgtggaaaaaaacaattatcaaggagccataagaagaacaattcccagaattcccactgggccagaggccattctagttctcttaagctagagtagaaagaactcattgagacttaatagagatctcagaagagccatatcttagaggcagggataaataagtgctaaaataaaggttattagataatgccataaagaggaacaaactaacctgaatgctacttcctgccaaaaaggtctcacattttaaacaggagcttcaaaaattattacacacatgaatatgtgcacatgcacatacacacatacacagtaggaaatatgacccataaacaagaaaaaaatggtagaaacagacggagaaataacaaagatattcacaatattagtaaagaatattaaaagacctattataggctgggtgcggtggctcacgcctggaatcccagcactttgggaggctgaggcgggcagatcacgaggtcaggagttcgagaccagcctggccaatatagggaaaccttgtttctactaaaaatacaaaaattagccgggagtggtggcatgcgcctgtagttccagctacttgggaggccgaggcaggagaatcgcttgaacccgggaggtggaggttgcagtgagccaagatcataccaccgcactccaccctgggcgacagagtgaaactctgtccccaccccccacccaaagaaagacgtgttataaatatgttcagagatataaaggaagacatgaacatgatgaagaagaaaaatgaaagacatcttttaaatgactcagtggaacttaaagaaaaaatatttgaactaaaaatgaactggatgagattaatggtagattaggcattgtaataaaatatgaaggatctagagtatagcaaaagaaaatgaagcacagagagtaaaaagaacagtatgaactgttttagagactcataggaaattatctatcagtccacatgtatataattagagacccagaagggaaaagcaaagaaaaatattggaagaattaatgcataaaaatagaattccacatttgattaaaactatatgaaattatttggtgaaaacaattgataaaaactataaatcaacagatttaagaagttcagtaaatcccaaactcaaaaaaaaaaaaaaaagaaaacaacaataaggcacattataaacaaaattgctgaaaactagcaataaagagaaaaatatttaaaacagccagagggaaaaaaagacatataatattcaaactaacaaaggttaaaatagcagcagacttctcatcataaaatatgcaagtcaggaaaaatggactgatgtccttaaaatactgaaaaacattaaaaaaaaaaacctctcaacaaagaactctacacctagcaaaaatatcttttaaaaagatacaaaaatatctttttatctatgtaaaggcaaaataaaggctttcagaggaaaaaaaaagctgaggtaattagtcaatggtacatttgtatttcagaattattaacgtttttcaggcaaaagaaaaatggtatcagatataaacttagaactacaaaatggattgaagaacatcagacatagtaaattggtgggaatttataaacattattaaaaatcctgaaaaaataactagccatgtaaagcaaaaaactaaacagtgtatagtggggtttatgatgtatattgaagtaaaacatatgataagttcagtaaatcccaaactaaaaaaaagaaaacaacaataaggcacattataaataaaactgctgaaaattagcaataaagagaaaaatattaaaaacagccataagtagccctaagaatgaggggaggggtgaaatttactgttggaagtgtcctatactatctatttagtggcaaaatattatttatttattttttgaaatgaagtttcactggttgcccaggctggagtgcaatagcatgatctcggctcaccgcaacctccgcctcctgggttcaagcgattctcctgcctcagcctccagagtagctgagattacaggcatgcaccaccatgcctggctaatttttgtatttttattagagacggggtttctctgtgttggtcagaatggtctcgaactcccaacctcaagtgatccgcccacctcggcctcccaaagtgctgggattataggagtgaaccaccttgcctggcctggtgtaatagtatttgaagaaggagtgtagcagtttcaagaagcacattgttagtcctagagaaaccatcaaaacaatggcaaggagtatagctaataatggtggaagtaatacagaactctaaaaaaacagtcaattcaagaaaaggcaagaaaaaaaaagaagaaacaaagactagataaaaaagaaaacaaatagcaaaatgatttagagccaaacatattaataataatattaaatataaatggcctaaatatgccactgaaaggcatatattgacagattggatacaaagcaagacccaactatatgctatctatgacaaatccatgttaaatataaatatgtagataggttaaaagagattaattggccgggtgcggtggctcatgcctgtaattccagcactttgggaggccgaggtgggcagatcacctgaggtcaagaggtggagaccaacctggccaatgtggtgaaaccccctctctactaaaaacacaaaaattagctgggcgtggtagtgtatgcctgtagtcccagctactcgggaggcagaggcaggagaatcacttgaacccaggaagtggaggttgcagtgagccgacatcgggccattgcactctagcctgggctacaagagcaaaactccatcatacacacacacacacacacacacacacacacacacacaaaatatatatatatttattatatatatattatatatatataaaatctaccagcttgaccaaattgacctttctagaatattgcatcaaacaacaggagagagaatatacattcttttctagtttatatgttatatttaccaaggtagaaaatattctatcaaataagtcttattctatcaaatgagtcttatcaagtgtaagttgattgaaattatacaaaatgtgttctgtgaccacattagaattaaagagaactatagctagaaaatacctaaattttggaaattaaacattaaacttctaagtaatgcatgagtcaaaaaagaaatcacaaaggccttcaggatatattttggactgaattaaaataaaacaacaacatagtaaaatttgcacaatatggctaatgcagcgcttcaagggacatttataaaattaaatgattatattcaaaagaaggaagataaacaatcaatgatctgaagcttctaccttaggaatctagagaaagaagagtaagataaacagaataaacagaaggaaaacaaatgaagaggggaaatcaatgaagtagagtatacacaaattaaagaaaatcagtaaaacctaaagctggatttttttttttttttttttttttgaaatggagtctcgctctgttgcccaggctggagtgcagtggcacaatctcggctcactgcaacctccgcctcccgggttcaagcaattctcctgcctcagcctcccaagtagctgagattacaagcatgtgccaccacacctggctaattttttttgtatttttagtagagacggggtttcaccatgttggccaggctggtctcaaactcctgaccttgtgatccgcctgcctcggcctcccaaagtggagggattacaggcgtgagccaccgcgcctggcctaaagctgaatttttgaaaagataagattgatagatctctagcaagactggctcagaactgaggagataaaacataaattatcaacatcaggcaagaaagggggatatcactatagagcgtatcaaaattaaaaggctaataaaagaatattataaccatctttatgtcaataaatttgacaacttgggtaaatagacaaacaccttgagagacagaaaactacgaaagttaactcaagaagaaaaaaataataagtcattctttatatatcaaagaaactgaattcctggtaaaatcttttcttgtaaagataatgccaagcccaaatggcttcactggtgaattctaccaaacgtataaagaaagaacaataccaattctacacaaactcttccaggaaatagaaggggagggaacattttctaactccttatcagtattcttttcctaccaataagtgacaagatactataagaaaactatataccaatatttctcatgaatataggagcaaaaatcttcaaaaaacattagttaatggaaatccagcaagatataaaaaggataatacatcatatctaagaggtgtttatcccagtaacactgtgttggtttaacatttgaaaattaatgtaattcattatattaatatgaaaaatatatatgatcacttcaataatgcagggaacagtttgaaaaaattgaacactcattcatgttgagaattctcaataaactaaatgtagaacatcctcctcaacctgataaagatatgtatggaaaacctatagccgacatcatactcaatagtgaaaaagtgaatatattttccccaaggttgggaaaaggcaaggatgtttgcctttactgcttccactcagccttatacaaagggttgtagcatatggaataaagtacaaaaaagaaatagaatattgatgagaaaggaaagagtaaaaccatcttccttcacaaatgacatgactttctatgcagaaaattctaaggaatttacataaaatcactagaacttagatgaatttaggaagattacaagatacaaagttaatatacaaaaatcaattgtatttttatatactactggagaattatcaatttaaaaatttaaataaaatactatttatagtagcatcaaaaccatggaaaaaattatacatatatatcaacatattcaagacccctaccctgaaaactatgaagcattgctgagaaatattgaagacttaaataaatggaaagctatactgtgcttatggatcaaaagaatcagtattttaagatttcaactctctttaccttcatctttagactcatctccatcctagtaaaaagcccagtggggttttttcagggtgggggtagaaattgatgtcattataaaaaatttatggaaatacaaaggacctagaatagtcaatacaattttaaagaataacaaagttgggggacttacaataccttaaaacttgctataaaggacaatgtggtattggcataagaacagatatacaaatcaatggaacagaatggggctcagaaatggacctatacttatgcattcaattggttttcaataaaaatgccagagtaatttaatggaaaaagaaggcttttcaataaatgatattgaaatatttggctatccaaatggaataaaatgatcctcaacccttagaagtatctttaaggaattacaactaggattgggtgtcatttatgtaagaaagattggaacgccagtcatcaaatcagtgatcaaaagaaggctttgttcctatatcaaaagattggcggatgtatgcaaatttatatattttgacttaaaatgtgtaaagactaaatgtttgttgcttaaccaaagtttcttgtttgtcctgatattgtcagggaggaaaactttttatcactgtgtttttgtatggttttatgagacttaacagaggtgttgtaaagtgcttggcatgtagaatcttctcaataaacagtttttagtattaccccctaccttcatttcttaactgttcctcatctctttaccctttgtcttattctatcatatttacctttcttcattggcacactgcatcttaccaaatagattgtaaatgcatagactgttttttatacttctaaccctcacaactacattttgtacttctaaccctcacagctacatacaatgtgcccgattgattatgtttagatcttttactactgcctaactgagagggtggacctaccttagggatacctttcagaatctgttagattgttcagcttctcttgacctattatattagaagagtggtaacattatttttaaccaaatatattaaaagtgtgattccatcattttttcctagaggtattgtctcctctttttgcacacatccaaattccctttgaaactcttgtgctaaaaatttcataagactttaggcccagccctttaaggaatacttatagttcagaaggcagaatagaaaagcagaggaaatgaaattgtcttcaatatcattccctggttttgctttgacttgataccttatatatattagaattaggacatatttcatggctgagatcgagaatatttatggcaggcttcttacagcttcattgcttcccgtatttattttgtgtaatagagaaagtaatgtttagaagtctgaaaaacttcaaggaatatattttcttcgctttaagtttggttggtaaaagaacttctggtcctggatagaatgatggcttgaaattcttgtgaattcaatagttcactagattgtaagctgtttgagaatagtggacatatctttgtcaatcatatgtggctccaaaagaacattgcacagtgcctggtgctacgatttttctaaatgaccaaatgatcaagattactacacagagccaggattgatcccagacaaatggtgaaataaggaaagtttgttttatgctacctctttttatgtagcacttttcttcctttctgtcttctgccttcttcctaacaccagtcccattctattgctcacctggccattaactaaaccctgataagatggaagggatcatcaggttagcctttgcatatgaggcatctttcagacatttgcattttagcaactgcctcttaaaggatgagggatgcatttcacagttcagatttggggccaagaattagctcctctgagctgcatggtatgtgtaagtgtgtgtgaacagagccctctgtcctgggatccacctttactctattgcttggtttcagaggatgaggatgactgcctgaggaaatagagaaactctgtgtaagaaatgacacttgagctggtccctgaaaaatacttgagtttttcaggttgggaggtggtttagggtaggggacagagcgggaagagagaaatagtaggaaagcattcaagaaaaatggaacagcatgagcagaggtacagagatggaagagcagggggtattttaggcacatcgagtggttctcggtaactggggcaaactttgtacggtagcaagtagaaggaaattggaaaataagaaaaaaaccagttggggcagactgtaaagggccatgtatgttattcaaaggagtttaatcctcattctgtgggcagtagaattcaaaagggggaagaatcaaattcctattatagaaagctcttcttggtagcagtgtagagggtggattttgtgggcagggagactagttaccaggctgttaaagcaattcagccaagagatagcaaaggctcagcagtggggaaaaggaggaaggatttcctttcagatagttaaaagagaaaatggatagcatttagcaaccaggtttgccctcatcccagttcatttattcattaattcaatcaacatttagctccctaatgtaggccaagcattgtactatatgcttgaaaaataaatagaacatggttgcttcccataacaagctcaaactgtagtaaggaaagctgacacttaacaattagaatgaattgagtactataacaggggtgaacaatgcgtgctgtcagaatacagagaaaaacaatttctaagaagctccatgagggtaaattcagtgttttactcactgttgtatctctagttcttagttgatttggggaaactaataggtgcttaataaatatttattgaataaatatatgagcttgggtaggtggctatatatggtcagagaaatgacaacgtcttctccactgtactgtagaccagagaagtatcaaatatatagggttgtgtccctaggtggtggagattaggatggcattggtatttggccattgatctagtctctttttctcttgggggctcatgtgggctccatggggactgtaagcctctgagagttagctagcaagaatagggtcagcatggctgtgtttgtttcctctttggcatttcttggaatttggtacaatcttttggaaaatcttagcttagttgatcagagataagggaaactaagggagaggttttgtctacacttgggtcagacagagattcaaggagagtaggacccacctcgggtcaggaaccaagtgggagaatcctatgaggaaaatgaaaccccagtgcaggaagtttaggttgtttattggttgctcctgttcactggaagtctccatttatgtatggaccctggaccttctggatttcattttattaagggaagttgaccaagtccacagtctcttaattgccactctgaaatccaacaggttcagatatgcaaaggatttttttgtagtttatttagcattaaaatatgaactaatgtgaattcatttggcagcaaaatctgacatacagtgctgtaaaactgtttgtagtcttaatttcatcttaaaagtgctcatatttttgtgttttgtgggagaaatgtttatgtgtttgattatagcatcttgccccagacacccctaggatagtgctaggtagtatttggtaaatacacgctattaccttttcaaaatctgaaaatttttgaactaggaaacacatcctgttcctaggatcttaaagaagtggagatttattatatattccctttcagggattagtaagggtttttggacaacatgagtgtagctgagtcttgaagatgcatagaaccttgttttggttctcagctggaggtggtattgtccctgttttagttttctagggccccggtaacaaaataccacagatgtggtggtgcaaacaacaggaatatattttctcaaagtttggaaggctagaagtgcaagatcaaggtgtcaggaggtttggtttctcctgaggcctctccttggcttgtagatggccaccttctctctcactcacacggtctttcttctaaatggctgtgtcctggtgtcttcttgtgtgttccaatttcctctttttataaagacacttgtcagattggattaggattaacagcctcactttaacttaatcaccccctaaagaccctatcttcaaatactgtcacattcttaggtcctagtggttaggccttcaacatatagacattggagggacacagttgagcttataaagctctcataggtgttggaaatgtgtgaatgtattctttcgaggttatgtggctgtagagtgttactctctcttcatgggcagggctagggttgctaaacagcttttagtatgaaagagacccctgtatgatgatttgtctgccacaaaaggccgtcaacatctctggtgtgaaacactcatgaaggctccaaagaaagggttggaccagtctctgggacaggctctgtcatgatggttctgtctttgatggaaagttgagggctagtaatcttaagagaatggatgttctcttcttaaaactactttctattctctcttttttactcaccttttagttggttctctcaagcagcattcctggactttgtgaaacaggtataataaatagatttaactatatgaggtttgacttggagctttggcttctcaatctctaagaataatgagaaatatatactttctgtgtttcctcaacttacctgtgactcttagactgaaataacaccccttcttaaaaataaatcctgccttgcctctaggcttgcagtggtatgaaataaaagtgcatgaagagcttagcacaagtgttcaaacaaccagggcatgaattagtacccagaaatatgcctgtggcatgtgtgggctctgacttcttcttggaatggcctttggttccagtatgtccccttttctttcccactgggtcgctggctccttcctgccctttggttaaaataaagggagtgggacgattcagttcttttcctgtttagaatattgaaatgccttgcaaatattattgcattcattagtgccatcataggttgttattaaattataaatcaacatatcatacaaatgttaaaaataacaagaaaatgagtctatttcataggcattcactgcccagacagtactccatttatgatttcttgagtcatgctgaattattcaggcctctttttacaatctcaacatataggagaaacaaaaaaacgataacaattgccactacaatacataaataaaaatgaataattcagaactcccatcttattttactccccattgtctaactctgactgatcccagctttgctttccatttcacagtactcagcaaggtagacaggagaattttcaggtatagaaataatgacagagcattttagttgtttgacccagaagaaccattcctgagcggttggaaacccatggcctgacttgaaatgtctttgcctatatatgtgggctctccttagtctttactcatcattgggttattctggggacatttaaaaaaataataaccattctccaatcagcaaatttttgaaacttccctttattaagtttcctctcaacaatttgaccagcaactgtagcaacaggttcttctcaggtataatgcttttttgcatttttgcattccacatgtgctagaattaatgtcccaagtttattttatcaggtggagaaagagttgaaaacaggaatgggatttcaagagttctaactacaatcctgtggctcgtgtgtggaccgtgctgctgggccaagagcctttctgatatgccctgtcgagttcccgagcatctgctgactaacaggcttcctgacctttggtttgctcccagtcagtgggcgttgctccagcccagctagagtacatgctgtggaggcagattctggaccactgcaccgctgtctgactgtcatttacccccttggagacatcagagaaggaggcacgagggctacaaagctagctaaagagcccatgcttccttctgttggacttttctgattctagaaaaccatttccaaacttttattcttcttgcaaaattatgaccaagggatagaaattgagaaaaaaaaaaatcctgcaccaaaccctcaatgataaagatagggaagagcctctccttggctctaacagttaattgaatcctttgtatttgtatgctggcatccaggcagacaaaagaaaataaaagaacccaatgcatgggattagtaggcccatctctttaataaactgcttggcaagatttgtatttttccaatttcaagtgtagggtttttgacttaggtttagattgcttaggtttttatttttctcttctttaccagcccgttccccaataaaagaggaagaaacatctgaattttaaaatcatctttgaaggaaattaatgtacacacacataacacatataatgtatattatcttgttagaaccccactttcttaagacattctttaatcatttgtgagggggttgggggcatgtgatacggaggtgggtgttggagcgatgctttagtttcagaaggcctggaggcacagagtcacagagagctgtttccatggcagtgctatggaaaccaggtctgctgctcactccttcccagagtggaatttccatgcttcttatagcatgggctccaaaaaagcctgctggtatcttatccaaactgtgactttatcattgaaatctcattgtaacctattattctggcctcttttaagtatgggaaaatgggggaaaaaaaggagttcaaaacactgctagaaagtctgaaccttagattttctggacattttccagaaggatggggagaatattagttttttgtcttatcaattgtcatttccataaccatctacttttctaggtcctgttttatagcattgttaagtcccacagtactgtaggtgataggtccttgtacctattttttaatctgttgaactagaggtgcaagatctgtccctttagagacctgtcatctctaatatctagccacgtagggtggtctcacccttcatatgacttgtccacgtgtgctgtttttcacacatgtggaccagatgaaaggtcacagatgagtcactgtaaattctttttcactctgcaaatgcctctcaagtatatctcttgctagcagtgggtttgtggcatcatttcatacctgaggaactgcagggagtgtgtgtgtgtgtgcacatgtgcatgtatttggttctcttgacatgagatgttgctttacacttacagttatcacctacttgtgttcttttaatggaaagattgttgtgtaagcaatgacgtcaaatgaagaccatgaatataagtacaagaagaagaaatgtgaaagtatacaagcacatttttagaatgggagaaagaaaattcgtgagtattttaaccccaccttttcacttcaaagttaggcataatgagcttccatgagcaacaccaggcaaggttgtctgcagcaacagcttattttgttagactaaaaaccagcaattttttttaaacttctctgattctcttattacatagaaacactccccaaagtcctttatcagaatgttcatacatcttttctatagtctcttcaagtttttctagcacgtatccccaaatctcccatctctaatgattccatttccttcctcaataaacaacccactctttatcattttaaatcattttctgctcaaggaacttgtgaatttctcaatactctgtgattgttttgttgttacggtgtcagaagttcctatatgtcttttttttttttcttgtctgttctgaatgatgcctttactgaattcaggactgaaacatactctcagaggtttttgcttcatggctgaatctcagtaccaatacattgaattcatctgaggaaaagtaccctgagtattgcgcaaatgtctgctgcctatctgactttgtcactcatttattcaaccaatatttagtcatctattctttcatttattcggccactgatggttcctatgtgtatagcattgtgctacatctaggtcacattggagaagcctatgatacattatataaagttgaatcatataagattgctgatattgtactgtttttgacctataaaaggtgaattttacatatcttaagacaaagatacagtataaacaaaatctagaaaaatgagatcaacgtttaaatacaggtttaaaaaatcaaagagatgaaacttaagggaagagttgaaaataacattcatagacaagaagaactagaaaataagaatctaggacctctcaatgctctgaagttcctgtagtgaccagtacagtagccactagccaaatgtggctatttagatttcaatttaaattagttaaaattaaataaatttaaaattaaattctcagtagtatgagcttcatttcaaatgctccatagtcacatgagaccattggctatcacattggacagcacagatgtaaaacatttctatcatcactggaagttctgttggacagtgctgcaaggctgttcatgtccataacttgataatggaggaaaaaataggttaagggagcttaaatttccttgtgaaaatctgtaatggtggagaaaatgttttgttacttggaggcaattctcattattcactgaaattcactggttttcttcttaggtactaagctgatttgtaggttattttgtaactgttagtggcccagtgaaatttgtcataagtcctaaaacatataaaataagcattacactaaaacaaacacacaaaaccttgctttttaacgactctctcctttgctggtcatccagccaaccctaatggctaaacatagcatgtgagatctggcttggctcttcgctctcttcgtggtccctctagctgagaattagtgcatactgaggaatactctaacacggaaagcaatcctttgccagccttcacatcttttgtaagagttttgtacattaggcattaagttcctaaatctaaacactttgcagattccctagaaacctgaacatttaatcccaactctaaatctccgctacttccttcctgatgactttttgtctatggtaactttcctatttcccccaagaggaatcagttttgggaatcctcaagtggtgacacatttatcattttcacctctgagtcattgcccatgttgatctgaagaatccatgatgatgcatgagaatacatgtgcacagaagcatacagactattagtcttgtgattttcaaatatctccaaaagtaaggctgttcaacttaatgaaaagcaaggaaaaaagaaagcaactcaagacgggtaattttattacttgttttgtgagattggacacacccctattgacatgtatggactcaattcaaaaaaggaatgaattcaaaattgttcactacttttagcctatatcatattgaatgaattagcattttgacattaggcaggcttaggtctaagtcctgtataaatgacctctggcaagcgccttcatctttctgacctcggcttcctcatctgctgtagaatcttgtagagtggtcattaggatgcagtgagaatatgtgtaaggcactggaacatagtaggggctcattaatgctagctattattattactgttatttggatgttcctgcactgcttttgttgttattgctgccaacaaacattttctcctcatcctgtttccaattcttggtacccagcgtcccagaagtgtagtaatgtttggaatttacaacatattcacatgcttcctttgccatctggttccgatttttgcctcactcttattctgcccttatatcataattctgatatttagcattcgaatggatgactctaaatagctttattgcttggtctttactttttttgatttccagtttcatataaaatttcccaggccgggcacggtggctcacgcctgtaatcccagcactttgggaggccgagatgggtggatcacatcaggagttcgagaccagcctggccaatatggtgaaaccctatctctactaaaaatacaaaaattagctgggagtggtggcggacgtctgtagtcccagctagttgggaggctgaggcagaagaattgcttgaacccgggaggcggaggttgtagtgagccgagatcaagctcggaccactgcactccagcctggagagacagcaatactctgtctcaaaaaaaaaaaaaaaaaaaaaattcccaaaacttcccaattacttaccttgttgcaagtaataatatctggttacaagtttgccatgattcatgaaatgcctctacagatgtctacagttgtcacgttaaggacaagtccataatttctccatttccaatgcaaatagtttcatggttttaaataccttgtgtctataataaacaccctgaatcgacatatctgatcttacctttcattttcttagttctattcctcacttccatttctttcagaggttgtgctctaatctcttacagcttcctcagacttaatagattaaaaaaacagaattcttaatttatatcatttgcagtgttcatttgttgaatattgtactaatatttctttagtgaatgcaaagtagtgtagcagaattttgctcatggaaaatgtctacagttgaaataggtttagttgaacatgagaagaggaacaatgaaaaaaaaagataaatacatatcaaaacagagattagggagaatacatagtgggaaatgataatgtaataggcaaataaaattcagtccaaatgcatgagcccagaagttatttcagggctgggtgtggtggctcatgcctgtaaacccagaagttatttcagtcaacattttgctaagaattttgttcccatgtagaagaaaagaattctgactttttttttttgcagtttcttctgttgggcatacacctaaaagtggggctgcacagtgtcttttatataatttggggcttagtacatatttgttcaatcgatttttatggaggttggaggggttgattaactcaaaactttaaccctgcctgtgaacaccagtatgtcttcagaatacagaatatattactttttttcttttgagacttctatgaaagattggccacgagtcacggagacctttgagaatctaatgaaaactatagaccccttttctggaaaagtatccacttacgaaatgctgcatgcagtttcagggaattcaaggatcccttgaggcccattcataaaccctgagctttgtatgtttactacatgttcatacatttcccttaatgtctcctccattccttatctccgttaaaagaagatctccgtgcctaattccaaactagaagcattttatcactctccactctccagtcaggctagtatgttagttgtctgatcccacagcttcatatattaagcctggaatgttctactttatgaggggaaatgcaggaaatgcctgttgcagccctcaggtaagtaatagagtccagaatgtcattgcactggcatagggaggactcttcttgatgtttctgtggcaatagtgaccatatttatttatttaaaagacagggtctcactgtgtcacccaggctgagtacagtggcgctttaatggcacactgcagcctcgcccttctaggctcaagtgatcctcctgcctcagtcttccaagtagctgaaaatgcaggcacatgccactgtgcccagctaattttttcttttgtagagttgaggtctctctatgttgcacatgctggtctttaactcttgaactcaagcgaccctcctggctcagcttcctaaagtaaaccgaaaccaaaaaaaaccaaaacctgggattacaggcatgagccatcatgctcagctgagtgatcacattctttagaagactaggtcatttctgaataacacctgacccttaccagatgagaataggaggagagagtgtttggttttcatactgccaactctattttggcatttttcttatccccttcccgaacacttataaatgcctgatgtccatttcactgaagttaggcctctgtttttggccagttgccatagatggcagtggctaatgatcagataaatgaatctcactactggacctaataaattaatctttctcaatgtgacatgtagctaatgttttattgctcattgacaccttaattcaattcagagagtgagactttcagaccaggtggtagatggttatctgtagagatgtattaggggtattggaaggagaagaagacaggttttctgtgaccctcttctgatacagtacgagtgactggcccaagatttgaaagtgttgacagtagcaaagattattatttcttgttcctctgattcatctgacagttaagagaaatcaacatttttgccagacactgtataggcattagaagtgcaataactattaagaagaaggacatagaatctgccttcaggttcagtttggagtgggatatagacatagaaactgattgttcattcactagtaatgggattattccatttctcagggccctgtacgaagggaggcaggctgctggaaaaatatacaggctccactcacaaataataaagccctttagaatgaccacatggtcatgagcatattcacaaaactacacccaatcaacaaatatttcctgagtgcccattataggatagacctcgaagctactgagtagacacagtagaatccctgctttaatgaaactttttagtagaggacacagatggaaaaccaaatgcgcgcacacacacacacaaatatccccgctactcaggaggctgaggcatgagaatcgcttgaacctgggagtcagaggttgcagtaagccaagatcgtgacattgcactccagcctgggcaacagagcaagcctctgtctcgaaaaaaaaaaaaatgatttgagacagaattaagtactatgcggaaagtaagtactgtaagagaataaagaatattggaggttggtggggaggggggtggtggggtttcatttaaacaggatggtagggaaggtctcttggaagcgatggtgtctgagcaaaaacccggagggtaggaaagaatggggagctctctgggttcagaacagcaagcagagaacccctaagcaggaatgattctggaagttcaaggcagagcaagaagatctcctgactagagcagaaagactggggagagaggcacaagatgaggcagactggatcccacagagcagcctaacatttctgggtcatgttctaagtgtgtagaaaaaaattggagaacttctgtttacaaaagagtactctgattgctggatgaagattagacagtgggagtgggggaacaaaagtgggacaaaaggccaattcagataggtttatccatttattcagtattcatttagcactgctagttataacttattcctgcctttgaggaactcatcttctagtgggtgttgctgatttctttctttttttcctccttatacccttttaagacaaattgtcatgctgaccatctctcaggctaatattttactttatgaattctatctttggcaagtggttctctgtcttagattagcattttaggattttgagtcacataacaaccattattttaaaatatctcctatataagcagcaccagacatacattattatctcttttaatcctcttaaaagtccagcaatggggttattattgttctcatttgacaaacaaggatatgaagtctcacagagatgaactgtcttagttatgtccacatgcttagtacaaagtggctgggacttgatcatagcctcttggccactaaacctcctggtcttcctaccacaccttgttgtctcataaagagctgaagtgtatagtgagcttacttgggaaattaggaaattggtttttctgagaccggtaatattcaagagcagttgtccttgatgaggtaactttgcttccagaagacatttggcaagttggggtggggttgatactggcatctatagggtggaggccagggatgctgctcaacatcttacaatgcacaggacaggcccctacatcaaagaattgtcttgcctgaagtgctgatagtgccatggttgagaaattctgttacacctccactgtactctaggtcatcactctggttacgtttctttgctcttgttctaagcagatgtttgggtccaactaaagaggatagaatctgttattaagctgtttttggtttggttttgtttttgtcatgactggttttctcctagccttgctttatctattggctcatgatagcctgagcgctgaactctatagggctcgggaaccccctcagtcattcttttattttatatgtatatatatatatatatattttttttttattatactttaagttctagggtacatgtgcataatgtgcaggtttgttacatatgtataaatgtaccatgttggtgtgctgcacccattaactcatcatttacattaggtatatctccttaagctatccctccccccttcccccaccccacaacaggccctggtgtgtgatgttccccttcctgtgtctaagtgttctccttgttcaattcccacctatgagtgaagttcatgtcctttgtagggacatggatgaagctggaaaccatcattctcagcaaactattgcaaggcctctcaggcattctgagccattctgatcatgtgctggggatctgccctgagttgctccattgctctgtgctgggtttcctctggactggtgtaagttgggccattagagcccttctaccagaaagttgtgtgaattgggatcaggtcctacttaactctgttcttactagcaaactcaaagtggccctagaagctctgagatttagaacatgggctaggaagcaaattgcccatcagttagcaccccttcagtgtttaaaaatgctgatgcacactgatgggaaagagagaatgtccgctattgtcccccacccccaaaagcactcatgcaatctttatggctttctcagtctagacactaacataataattcagagctgccagagtatatggccttagaaaggcagcagatgtcccacacatttgcatttaactttacagtgggtaatgtcatctagaatcatcctttgtctctaggtcaaaaggttcattccattactaaaagcataacagattatggattatctttctactgctgcttaaacttcccttcagaggagccatcctaagctgggtgggttggttaaggttcctgattctatgacagtcctgctctgtgagacggactcagaagcagactgacagtccttgacttggtgcccttttttaagaagccccttgctacctttacttttcctgtgacttgcctgactacaaaaaaaaaaaaaaaaaaaaaaaaaagccttctgcttaataaacgtctgcttgtaatattctgaaacaaggaggctaatcaaaggccctgttctgcagaacagggacgctaaatgacaagattaatttccgtaatcaagcagcttaatttggacagtttttccctctctgttgctgattgcaattgaggcaaatttcgctgtggtgagattctgcctttgcctaggaaagcttacttactggtactagaagaggggaggcaaggtgaatgtggtcagagagatgcagggaggtgagaaggagaagggcattatgtgaagtgaaatgtgaacgagtgagctagtgcacaaagtcatgggaatttttctaggccctcttatatgaagtggtgtgaaggactttatgcaattgtccacacagcgactactcacagtcctgaaatatttccatcaggagaatcacagcacggttgtcacttagactcatacagccgtggcaggtttgggcagaaggtcaccatagaaatcgtctaatccaaccacctttttttcataaagcattctcaaaaacattaaagaacttgcaccctgttcattaacaccaagcaaaatttcaagacgaaatggctaagcaatctaatgagatttgcaggaaaataaacagtaacattgtgatggaccttatgtttatataaagtgttataatttacaaggcactgtgagtaattttttttttttgagatggagtcttgccctgtcatggcactttgagtaattttaagtggcagactatattactcaaattagaatttaaatggattttttaacccttatctcatatataaaaatcaaatcaaatggattaaagacttaaacataagaccagaaactgtaaaaaatactagggaaaacaatgggaaagagctttataacactgatttgggcaaagattttttaaaaatatgatccccaaagcatgagcaacacaagtaaaaatagacaaatgggattgcatcaaactagagagtatctgcacagcaaaggaaacaagcaacagagtgaagagacaaacctacagaatcggagaaaatgtttgcaaatcatacatctaataaaggttaatattaaaaatatataactcaagaaactcaatagcaagaaaactaataacctgacttaaaatgggcaacagacccaaaaagacatttctcaaaggaagacatacaaaaagccaacaggtatatggaaaaatgctcaacatcactaatcatcagggaaatgcaaatcagaatcacaatgtgatatcacctcatagctgtcaaaatggctattatgaaaaatacaagagataacaagtgttgatggggagatggatgagaacataacttgcacaccgtgggtgagaatgtaaattattaaatcattatggaaaacaatttggaggttcctcaagaaactaagaatagaattaccaaatgaccccagcaatcccacttttgggcatctcaaaggaaatgcaaccagtatatcagaaaaagctgactcccatgttcattgcatcattattcacagtagccaagatatggagtcaacctaagtgtccatcagttgatgaacacataaagaaaatgtggtgtgtatatacaatggaatactattcagtcttaaaaaagaaggaagttgtgtcatttacaataacatggatgaatctggaggacattttgctaagtgaagtaagcaagatacagaaagacaaacactgtatgatctcacttatatatgaaatctaaaaccagttgaactcatagaagcagacaataggatggtggttaccattgggagttgaaggaattggggtatgttgatcaaaggatacaaaattccagttagaccacgtgaataaattcaggagatttactgtacaagatggtgactatagttaataacaatgtattatatacttgaaaattgttaagagcagattttaaatgttttcaccacacagaaaaatgataagtatgtgtggtaatgtatatgtcaattagcttgatttagacattccacaatgtaagcatatatcaaaacatcatgtagtacactataaatacatacaatttttatttgtcatttaataaataaatgcaaataatttgaattcaatatttgttgacttttaataacataaataataatagcctgccagcttattgtttcttagaaagatgaaacacctccccatggggatttaagaatcttctttttttcttgtgctgtagttagcactgaagaacaccactttcaaggaaaagaacaataccatcttgtagttttggataactatttgaaattttgaccttcaggcttttctagatataactttgtttagattatcttatgcggatccatgaactctggtttctgctaggaaatacggtgaggtaggttaatctgtgggcaagaagctaggtagctataggttttattattaactttgtctttaacctcagtgagtcattgcacctttctgcgctttggtttcttaattgtaaaatagagatgactatacagatctacttcacagaagaataactaatcaatgattgaaaagctcttttcaaacataaagtactaaataaatactaaaaaatgaaataaattgacttctaaataaaatggggacaattaaatcaaggctagaccagactgaaactaatagtaaaagcaacaaggctttgtgtatgtctgtgtattgcgaatatgacaggggaaaacttaatgaccagtaaatccatgaaccctgggttagcacagtgaggtatacatggatcaagatgccactgtgcacactaacccaagccctcaagagcaggatgttagagaaacctggttggttcattttcccattcattcaaaaaatacttagtaagtgcctattatgggcaaggcattattgctacaagacactcttctagacctcatggagtttagaatgtattggaggagacaagaaataaccaaatgtatataatataaatctctatgagaaacacggcaggaactgtaaaaactaagtgttatataggaaatcagaagttttaattagtgtgaccagagaaagcacactggagaaaatgttatttgaattctacaggttcccttgggcactgacaaggcaaaggggatgcagtcaaggtggagggaccaggacaaccaaatatgaaagtgttataatttttaaaaatgaaggggttcagatatcttatgtttggatttgcattgaacagatggaagagacaggactaaaaatagatggggttgatcatagtgaaccctaaatgattgtggagaacctaaaaggcataagactatatgaaagtaaaaactttaggaataacaatctgaaacactaacaaaccactgatctccctgggaagtgagaagagcagagagtgaaaatcaatttaatagaatgtaagtaatgcagtgtacggtgaaaaaaaaaaacagtccacagaggattaaatgagcatttaaaagatttcttatctaaaaataatatctcactaacaaaaaaaaaaaagagagctgcagaaatgacaaggtacagtgagatcagaaaggagaggcaaaagttggcaggtttatacttgatcacccaggaatgcatattctggtgaaaagatataatttggcaagttcagagaaagacgaaaatgggtaaatggtgaataaagtacttagtgaagtggcaattcatattgagaacaatatcattctttgtcctgtacttgaaatagaaacagaggggcataaaatggctggttgggacaaacagaactgcaggctcacaggcagaaaggcaaatgcccaactgggttgactcgctacatcagctcagacttggctgtgggtaaccccttgtgaattgttgtttccacatgtgtgttgcttcatttttggctctccgttgtccccatcaccttcccatctcaccatagggtttagggtattttgctgtgtgttcaaatagaacatgaaagaagccttttaaaagtatttctgtgcctattcacagtcccctaaattttattacagtttttacgttggtttacagagtattttggtttgatttatatggaaaacttcttttttaacattatagtagcatagatttttaaaaaatgaaattctaggaaacaaatattatagactagttagatggcaaggagaacaggagttttagaactaacttttaatctccataggtactagttgtctggactagctgagtcatttcatctcagtaatacttggtagtgctgtgaatagcagatcttgcatgcacagaacacagcccagtacctggcatgtgacaggcactttattttctgttaaagttaagtacagttgacccttgaacaatgtgggggttaggggaaccaacctcccacacagtaaaaaatctgtgtgtaacttttgactccccaaaacttaactactaacagcctactgtttactggaagccttgctgataacagaaacagtcaattagcatatattttgtatgctgcatacattattatactgtatccctacaataaagtaagctactgaaaacaaaatgttattaagaaaattataaggaagagaaaatacatttactattcattaagtggaagtggataatcatagaggtcttcatcatgtcatactcaaattgagtaggctgaggaggaggaggaagagaagaggtcgttcttgctgtttcaggagtggcagaagtggaagaaaatctgtgtgtaagtggaccctgcacagttcaaacctgtgtgttcccgagttaactgtatcactttaataatttttcttgttacaaaagcaatgcatgaacatttgagaaaaactagaagacaaggaaaaaattaaccagatagttaatctcactagatagtagttagcattctgaacatctctcaatgtgcaatatataaaacaaaaataaagtcatattgcacatactgttttgtattagtccttttctatttatgtaaaaaatttaaatttatttgtattcatatatgattatcctttcccatcaagaaacatctttctacataatttcttatggcttcatggaattctgcaatttaaccaattctctattcagtattttatattatttttaaattgggagattttacaaataatagaatgatggacatccttgtagataaatctttttgtctatcctaaattatttcttcagcataaattttcagaactggacttacttggtcaaatagtaccaacatcttgtggctttgaatatttattatcaaattactctccattaattttaaactagtatgtgtgttgatcaatagtgtatgagaatatccacttcccccgcctttgcaatatggaaaaaaaatttgtgcttaaatttctatttagttgatttactagtgaagttgaacttttcaaatatacttattagccacttgattttaattttgcctttgtgaatagtatgttattctggttggtattttcaaatggaagctgtcttttccccgtgtctatcttcatgatttcatttagtaaagtattattctttgttcacatttgtttatttggctagacttcagactccttcagggcaggattatatgttattcttttttgtatcttgagcacccaagcacggaagaaggactcagtaagcatctggtgggtgcgtgaatggaggggtaccaaacaaacagaaggaaggttgaaccaaggtaagtgtccctgtctgctcacccagacagtgaagtcactggagtgtaggtaactcgtcttgtctaaaccaagtgtatagagctcagagcagttcccagggaacagactgaagtgcttagtccaacaagagatggatgacatgtaagacagtgagtaaatgaagacagaaatgagctgagtggtctccaaaagttcagatgaaggctgaatgctggacagctccttgacacagggctgcttttctttggttctgtcaagatttttcctgagtgacaccttaggatcgttatgtctgatttcctcattgatcacctcacccggaaggaattctttggagtatcaatcaagggtccttgctgtatttcttattgagaaggtcatttttgtttggccaagactttgttttcatattagatggtaaagccatttctacaggccccactgggacagtacaagtttctctgtccttctctgttctgggcctgtggtgttgtacctcctagatgtactctcttgacttcttgctctctttctttgaaattcttatcttttgagctcctaatagttgtagagaaagatatagggatgaaaaaatggaagaaagggaattgacactagataataaatcattgatcagttttttatataggggtcacaaactgtgatctgaacatgtggcagagtgttttacacagccaatgtatgtttgtaacatttgcacaatacattccacatagtgcgcttaatgatcacgtactgtcctcgttatatagaacttaattttaagtcagtatttacaatcaataagtatatgttgatatggcaggttttggtttattacaaattgtacgtattgtttgcctactgttcctgcagtagggacagacagttttataaatctccggcgtattaggcattcaaccagaaacaaaagaaagagaagataaatccccttgaggaatttattcttaatttgtataaactgttaatacttgctgatctactacaatcttcttttcaggtaaataacatatatagacctagcatcttacatcatttatatcattttcttatgtatttacatcagaatatagcatagcatgacatttaagacatctctatacaatacaaagtgaatttttgacacgtatttggttaattagatcattgtgaacatccaaatcatgacgtacattcatagtaaatgtgttagcctgtgacatccagtttggtcctccatagaagcaaaattaatcaggcaatgaaagactattattttcactgtaacagtatgctgaacaaggatgccatgttcatttgtctcataatttctgtgcttgtgagttcagagatgttgatactatatggaagccccaaggggtgacagtttagacaattaatggagatttaaaccgtggttaataaccaaatttaagtaaatttgtgcatgcagaaaataatcaggagagacattaataactatgaagccactttagcaaagagtgataaaaatggtcaggagtttggataatgtcagttaaactaagtttaacaaacactgtcagtgaagaagaggctgggagatgaaaatgaatgtgattgtgctatacaactgagggaagattgtaaatgttccagagtacccacagagctttgataggagaaggcaagtagaggctaagaaacactatgcccaaacttagcaaagacaccagagactgggatgggtccttaacgtcaaaattgagcacagctgtaggttagtcatcaggttctaagactgctgcactagagaatggtctttaagggaatgtgacatagtcctcccatggggtgaattatcagtgattccaggaggaaaatggcacacatcggttgggtttgagggagctgctttgtgttcccattattagagctctttctattctggtgctgatctttcatcaacactgaagaatggctggtattgttcagtagagtcccctgggagaaatagagtactatggagcggtttcttccaggcaggcagcaaggttttaggtctggcagatcttcatattaggagcctgagttctctccctgccctgcctagcaggttctcctgatgcattctctccctcactctcaccctgggtggcatccttaacttgcctgtaccccctgccatcttttgacagtcaatttttctcagaaacaatccaccatgctcctgaccacccccagtcctccttccctgctcctcctttccccccctctctcctgctgatttgttattatgtactgcagctgcccggaggattttaaatagacccataatggcacagcagtgcctcttggaagtttaaatataaccttcttgttaatcttgtctgtggcggcagcaggaacagcacctggagaaggcaatgggcaagagatgccctggggttctaccctgagatcaggtctagcaatctttcaggtgtcctgtgatatgaaagtatttggtctcagcctcatgggtgactgtgtctcagccttaagtggatttggtgccagattgacagtccctagaaatgtgagcacagtggaatacaagggcgaaagagactgagggaaccacaaggaaagtttaaaattcctctccaccttctgccaaaacatgtcacccatcctttgccactctgagaggcagaatgtgtttagtcctatttagcctttggccctgtgtggggacctgcagggggaagggctaattagtgtcagttacatcagtggccatgattcttaaggagcaggtgtacaaataataagcacttccaagccacaaaataaaggcctcagaacagcttccaggggatgcaatgggtggttgctctgacccagagcagtgaaattgttcgtgaaggaaagatgcctacaaattgcagtcccagtacccaaacttgtcagtattttcttggatttaacaaatgtcaaacactaacattaattaattcattcaatgaatatatgttgaatactagtggttgtgggaaatgttctcagatcaatggaagaaaagagcaacagggaaaggaggcacctttttgaatgtaaggaggccttcaatgctggaatgacagacccttcagaacagagatcgtcatgaggacatgttctaagatccatctagtttggtttttttcctgttgaaatgttctagaatgaactgattgtccaagcgtgggaataaaagagattagacatttaatgaaaaagaatttaaattctgtggagtgtaaagaagtattttaaatgcttagttttggtggaagggatacaggtggtgtcatttgttatcttaaggcagattacaatataagagaggaacctgaacaaataataaatacatatgataataagcatatcaaacattttatagtatattttggggtatgttgtatgtttacatacataattctatattgtactcatactaccctatatggtgaacattgttatcttcattttatgtaagaaaaaattagcagaaactgattagatggtttatccaaggttaatgagctagttagttgtgggaccaagacatctaactacaaatatgattgtgtgttattcataattgaatccctaggggctggtatgatgcattgcaacactgacttttttttttttagtaaatgaatgaatgatactatttccttgtttcataactctacaatcatatgttcatttttaaataaacacacaaaagccatttcaaacattttagtattttagtagagaggttactgaggaaggagaatgggtcaggaatggttctaatggatccatatagttgatcatgggatacattctagagttttgctattcaaaatatggcctaaaggccagcagcatcaatgttatctgggacttgttagaaatacagaatcttaggcttcagaatcatagttgtgacttaaagattgactttgagcaggtagaaagtcttcttacaaactgaagtctgcaagtgattataggtaggagatgtgtgatggtagagaattaaatattactagaatatcactgtaataagagcagaaagcaagtgggtagagaaaggatcacagaagggcttctatccagcctgtgctttcgtgagggagaacagctgaaccatccaatttagacaacacttttttataagatttctaaggataaagattatgtaaagtctgtttatagagttttaagtccatcaaacaagaatattacctccacctcatagatcatgaaactcttgctgaattttgtttatttaatagcttttaatcctataaggaaatggagaccagttggttgttacattagtcaaaacagtatgtagtttcctacctatttgcatgaaagtagacctttttgaaaatggcaaagcaggtcctacccacattctgagaaccattagggattcttcaaaactataagcaggtctgatgtgagtgaaacagaataaaccaatccctgcccaaatgggaacagatttctctactttccattatcattttagtaaaagtgcaacttatagtatttgctattgtctgaatgtttgtggcccctcaaaattcatatgttgaaatcctaacccccaaggtgatgatgtattagggggtggggaatttgggaggtgattaggtcatgggggcagagtcttcatgagtgggaccttataaaacagacccaagagagaacttttgccccttccatcatgtgaggaaggcatcatctgtaaaccaggaaatgggctctcataagacattgattctgctagtattttgatcttggacttccaagcctccagaactgtgagaaataaatttctgttccttgtaagttacccagtcaatgggtattttgttatagcagcttgaatggactaaaacagtatttttaatcatctatttatttctttgagtgagaaatacaaaagctggataatttagcctcctttaaggactcacaatctaaatagatagaggtagaggaatcatattgtttgtcaaataaaatctttgaggtgagaatgaacaaggcaggcatgacaggtaattaggaaaactaggatctggtaccaattttgccaccgaatttgtgttcttagaaaacatctaatttctttaggtctcaatttcccatctgtcaaaatgagaagtttggattggatggactttcaggtctttcagttcatgctcccaagcctgcaggggaatggcagatcaagtgttagagtgatggatggagaggtttcgctggccagatggaagacactagatatgcagcataaagtctgtttatctcacaaaggttttttaaatgagttgatcattgtctttttcctttataagatggtttaatatttgcatcactcattgtctgctttcaaggttaatggacatttccatttcaaatggccctaaaagcttctctgaattggggaaaggcttgtctggtgatttgtaaacccaagctatagttgatcatgcctgtgccttgcggtcccaattatgctgccctctggccttcttccccctgactcacaaagtgagactaaaaagaaagatatccaaggagtctggctgatgacccagttggagcctcagagactggggttggggcccaaaatcagagggtctgatcctcagctttgtgggtctgcaattggtcaagttttcaggagaggccatattttacaacattaaaaatgtgtggtgttctccaaaaaccttctacattttcgtttatgcttctttggttatatcagaaacggatgttccattcatagccaatgtgtgttgaactcttattgcataccatacactggaaagctgtttctttttttttttttttaattatactttaagttctagggtacatgtgtacaacgtgcaggtttgttacatatgtatatatgtgctgtgttggtttgcttcacccattaactcgtcatttacattaggtttttctcctaatgttatccctcccccatcccctcaccccacgacaggccctggtgtgtgatgttccccgccctttgtccacgtgttctcattgttcaattcccacctatgagttagaacacgtgatgtttggttttctgtccttgtgatagtttgctcagaatgatggtttccagcttcatccatgtccctacaaaggacgtgaactcatccttttttatgactgcatagtattccatggtgtatatgcgccacattttcttaatccaggctatcattgacggacatttgggttggttccaagtctttgctattgtgaacagtgctgcaataaacatacatatgcacgtgtctttatgtagtgtgatttataatcctttgggtgtatacccagtaatgggatcgctgggtcaaatggtatttctatgcattagctagttgaattcttacaacatatgcaacaataaaattatgcattatcaatatgcccatcttacaggtgagaaaacggaagttcagagttaagccaagcagcatagtgaaagtgcatggcaagatcaaattcagttcttccaattgtaaaacgtttttttttttcgccactgcatcaacctgagttccttctctagaaaagatctcagccatgttttaataactgccttcttatatctaccttgccacctaaaatttagataccctgatgtgttaactttttttctatcttatagtattaactcagttagcttattatccactaaatgttgttagatattttttctctacccaatatagatggacacagcttatttttactaagctcatttgttcttgttaaacttttcttgtttggttctaattatgtcatgattatgtatcctagtcattctgaattctcatgagtgagcagagctgggctttaattgctcctttaagtctcaaaacatcagaatggcccaaagaatcatagggctctggccttatccagccatcccaggagctggctctaggcatgtggcagctcctctcatggtgaggcttgctggcaatagaaaagtggaactgaatttcagcacacacctgcagtgcagtctggcttcgatgcccaggacaatgaggtagcttggtgtccatctggactcactgatcacctcctgggaggacaaaacctgaattagattgtcatggctgaacagaaaggggcattgtgcattctgaggcttggcgagtagagaagcacttgccagcattttgctgagttatatcttcccattccatggctaacgttatttatttttagtctcatttcttctgattactcaattgacttgaacatgagaaaaatgatggctctatcagacaactgtagagggatttcttgctggagacatattgatgtaaaactattttattttcttggatgccactggatctttgtgacctcttgggtatttcgggtccgggggggaggttagtggggagtggttcacagtaatggaagtagctgaggcatgatagtgtgttctggtgatagctcattctagttggacatttaatttagtagagcagtgcctttgcaaatgcattgaaatggatctgctgctggagaatactggcatcttgccataggaatggaggtggttctgacttaagaatgtagacgtggggaaactactctgctttcctttgctttaacttttcttatgctttctttttcttgatttttctttttctttttttcttttctttttcttttttttttttttttgagacagagtctcacactattgcccaggctgcagtggtgcaatgaagtgatctcaactcactacaacctccacctcccaagctcaagcgatcctcctgtctcagcctcccacaggcacatgttacgacacctggataatttttgtatttttttttttttttttttttttgtagagatgggattttgccatgttgcccaggctggtctctaactcctgagcttaagcaatctgcctgtcttggcctcccaaagtgctgggattacaggtgtgagccactgcactaggccctttttatccacttccatgaaggacttgaagacacagattttaaaggatttaaaaacctaaccctctcccacttccttcttccaaaaagtctgattttgaagatatgacttactgattgtgctcagaggctaagacagagtgtgaagaatccccctggaacacaccattcagataaggggtcaaaatatggagaaagcagctggaatagcaatagccagaaaggcctttctaaactgtaaccagtgggaaaagtgctaaggataggttactagagccccttgggaactgatgaggagtggattcgaattaggaatcataggccaaagaaaagtaggagaaaaacagaatcacaattggcatggccattagggctgatgacttcattctgttcagaaaggaggaagggtactgaacacatctttggttagaggataagcacatcctgaaattttcttgagaactaaggatttgtgagttgaataacgtttttttttttttgagacagagtctcactttgttgcccaggttggagtgcagtggcacaatctcagctcactgcaacctccgcctctgaggttcaagagattctcaagcttcagcctcccgagtagatgggactataggtatgcaccaccactcctggctaatttttggatctttagtagagactgggtttcaccatgttggccaggctggtctcgagctcctggcctcgagctcctggcctcatgccatctgctcgcctcggcctcccaaagtgctgggattacaggcgtgagccactgtgcctgccctgagttgaataactttatccagcacattcagacttgctttggggttcatctgaattacagacgtgacaaatgcagttggaaatattacaagtaacacagacttccccaggctgcaccactttgtgattgtataatattactaagagtccagatctcattgattcttgcttcttcctactcatttaagaccacaatcctccacaaaatcactattccctgatgtgctgtggggagttctcaggagggcctattacagattcacagacagttcaggtgcaatatctgctgagaatgcctgccactttttgtgtgtttcctggtttttcctgggtgctgccaatgtttcctgttctaattgcagtggggaccactatatgtgttaggcatggctgctgcttctgtcaggtgccacagcatctgccttgcaccatggcctctttcagaccctgcggtcttcttccattgagagcacagacccctgtggatactagtttcccactagtcaccttcctcagggagcctgaagccttcatgaagttaaagcttcaacagggtctggggtgaagtatttgagagagattcttatccccaattatgttaggcaccaaagctggatggtcatgtcacaatatctcctaaaggttttaatgaaaaagctcctttggtttttacttacatcttctcctttcttattccctgaggacccacaggccaggctgggagagcttcaagggatagccatcatggtggtttctaaaccgcttctctcatcctatgactatagctctgttaattgattgagcttgtttgattccttcctttcctttaagtaagttctcctctagggagctcctctgtttctcatgaaaatagacttctgcagagcccatccctttagtttcttagacatgcccaagcactcaaaatgctggcactggcttaagctggggcatgcccttcataggtccaaggccaatggccagtggctgcccttgagatgctgccatcagtcacggcagacatttgaggcttatgttaagtgaaacaacgaagcacagaaagacgaatatggcgtgttctcatccatctatgggagctaaaaagtggatttcatgaagctagagaatagattagttgtgaccagaggccgggaagggtaggggagagggagtacaaagagaagataattattgggtacaaatatctaattaaaaagaagaaatgagacctgatgttcgatagatcagcagggtgactacggttaacactaaccatttgcagatttcaaaataactacaagagaataattcaaatgttcttagcttaaagaagagataaatattaaatgtgatggatacactaattaccttgatttcattatatgaatgtatcacctgtacccttaaaatatgtacatataatacatattaataaagaattatttagttaatttaaaaaattcctacctcataaggctattgagaaagtgaaaaagctaatagaggtgtttattcatgtggttaactcagaatattgtaggaaaattataggtaccccaataagaaacagagtgcaacatactgtccatggtgcattctgtggttctttctgtcattaaaaattctgtaagcctttcacatgacatggaattttttttttttatttttttttttgagacagagtctcgctctgtcacccaggctggagtgcagtggcgcaatctcggctcactgcaagctccgcctcccgggttcatgccattctcctgcctcagcctctccgagtagctgggctacaggcgcccgccaccacacccagttaatttttttgtatttttagtagagacggggtttcaccatggtctcgatctcctgacctcatgatccgcccgcctttgcctcccaaagtgctgggattacaagtgtgagccaccgcgcctcgccaggacatggaatgttaaccctgctgtcataaacatattctacttcagctccttaattctctgtgtactgtcatttttttctgtagctatgatattatgacctatgctgaattaggtgaaggccaccctgagggctgccccaagccaccttctcctttccctgatgccaagcacaggctgtgacccctgtgtcccttctggaccctagttctgtgtctgcagggaagggttccagcctcgtcactcccactggaacagcagcctctggacttgttctgcttctcactcttggccccgctctctgggtccttatttcaacctcaatcttgcccaaaccaaactgccttccttaggtcttgctttcagtcctggcataggtcctcataatggtcctaatttcactttaacagcttcatcaacaagagtgggcctcctttctaagtctgaagttcctactgtgtattttataaaatcactactcagcaccaatgaacagtgaccatgccccttcaaaccaactgaaagaaaagaagtgattctccacagaggattcatgggagatgactattataaaatgcaattaccccaaaagttatggaaaatataatgagggacctcggcagacctcatgtcactgtgtttaacttgtacatatctatttgggtctctcaaaaggggaagtgaaaacattttcatctgggtcaggtggatttatgattagggaacaatgtttttaaaaattaagcttctttgtttctattaaatgtgtctacacattcaaggaaagtaaagataataagagaggtgactcagattggaagggtttggggatgtgtgggacaggaaagtctgaagagccaggatgggaggggatgagaggacacaggagagtggaaggtcagtgcagaaagatggggtgctgtgaaggagggaggttcctgcagtgatattgaaagagggaccaaggtcctgcaggccgaaggcttagagatttactacagaggggctgcgtctgtgatggataggcagatggaggccaggagaggagaggattaatccaggcctgtactgaaggatatttgcatccctcagttccatgggagatcagaactgagaaagtgagcagttgtctcaaaggaggaggatttctcagctcatacctcaagtatcaggggctatgtaggaagagtaaggatgctttcaactcatgccaagctaagtaacgtaaaaatctacttccaattcacctcacctctatggtcatgcatgttctggggcccttgcacattttagtaaagacgctagaggagcaaaagattgcttctgccactcacagtgtctcccaattttacttctgggtgatagtaacagcaagttaatttcaattgatatcagtggttatgggggactctgcaagacattctatttaattaggttttcttaaaaaaatagcaagtaacatatattgagcacttacttatactcctcactttacccaactctgatgcatagccctgaatcgcttaatccttccaacaattcttacatgagcataattattatcaccagtttatagctgaaaaaactaaggctagtagtgcttagataatttctccaaatattcagagcgactaaaaaaaaactgatcttggactgacagttcttacactagggtatttgccatcaaaatagtcttccttttagggtctcttgtgatttaaggaaaacttgcccaggggatgcaggggagtggggcatcctaaactagaaacatccttttccctcatccaagtcctttaagctgcagccatcttctgaaacctttttgctggaatgtggaaggcacatgcacttagtttaatggtaacatgcttttgcagttattgcctcttaagatctcagttgttaatgggataccattattgcaccgttgccagtggtttttcattttattctgatactctggcatggatcctacagaggctgttgttgaatataagagtttataacctctgacatgcaagtctatggataaaacatgatttgactgttttaaaaacattctctcttgtttaatgaggtttttaagtgtgtataggaaaaaaaacaacaaccaggactctttaagaagcctttggcaagaagctccagaggtttagctagagctgacttgaaatgtggtgaccagccattaatcggatggtcagcaaattaagtgagttcgacatttgccggagctttgtatctccattgccagtttcatgttccacttgcttgcagtcagccagtgcagagggaaggtaatgatgctcaggccaaggcaggtcttccttggagaaaaagggaagtggtctctcctagcagcaaagatagttctagcaaagtccccagagttcaaagggagatgcttgggctgaaacttaacaccttccctcagcaaaacaatcattttggctgcaagcaggtttaactgtcacatgaaacatcaatacacagaaattaagggttcctcgaaaaggaaagaagggaaaccaaagtttatataagaggcacgtgaaattgttttcccagtgggcaccaggtgatttctgtgtctaagtaacaggaaaccacttaatttttccttcccttggtaacctcatttttaaaacgaggttgggtggctgacttccaaggctctcttgtgagcaagcattctatggttctagcaaatgcttggtaagagttgaatatattaataaggtctttatgcctagatttttataatttttctctgattgacagtatcagtaatggttataatcagtagaaatgagagaaatgtgttattttaatggttatatttgctggaaacttagtccattctgttgaatactatatgtgttccctatagtggcccttctaatgttctgagagtccagttctgtccccgcaattcaacatcttttctttggaacaaagtggaaagcttcatcacacataatctctcttctaatatctacctgactttgggagaaaaattatatatttagacctctcccacttgagcctccctctacctgccacataagctattcagatggaacctgatattttatccttccttcctcttcccttgcctctgagatgacaggatatcagtcccaaaaggtcttaaggttcacgagggctccattggcttatgccccagagaggcgtggggctgctatgaagaatcttcctggtgtatttgagataagttggtatttgcaggctggtctggggttgcaatccccatttattacattggatcaatgggagaatgcttttggatttctaaataactagcttaaggatgaatttttggaatgtgatgtatttatggattggggattgatcagcctaatcagtgagatgaagaagttgggatctttattcttaaaaatgtaggttccatgaaagatggctcccactggcctaaattgtatcttcacaattgtctctgagtttgttacatggattggaatcttagttacaggcttaaacgaccataataggatgtatgaaatccttagataatttgcatattttctgaacacttaaattccttgctttttttcttccgcccatgagatctttttctagctgaattggcaaatctttgtgtttcagttctctggtacggcttgcccttttgcagaagtgctaataagctataacattgcacagggagaggcgctgggggttaagtcacctgaaataatgcagatgtttctggcaggtatagtcctagaatttgaatagtactttttctatttcagaccattggtagcagccaagtcccattgtacttgccatttcctttctgtctcctagactatatgaaatagaatcttcaccttttctgatgatacgtgtccgataagcaatgaatggctgaagagttggggaattccactgaagttcatcttcttttatgcaggggcttctcatagacttaagacagcttttcaaataatattcagtggccacttctcctagcctaggttagacatgatcctgcatttcatctagttaacagttatgcctattttaataggccttaagaaaaaacaattttaaaaagatatttcttagatgaattgtggttttgggaggtagaagctgaacagaaagcagcaggtaagaactgtctatcaaaggttccttggaggaggtggatcgtgctacatactttttttttttctcctttgaagcctgtatttattgtccctcctttgtgcagagtctcaaaccgggaggactaggcactcttgaacgggcccttttacctgctccctcccagcccccacctgcagcgcagcctgcatggacaaagaaagggagtggacaacaggcacagcggcaaaacaagctgtgtcagtttccctttcttcccctttgagtttgtaaaagagctatttccaagcttacatggttcacctgggtttcaattcaatcagggattttttcttttccttttttttttcccctcagccctgatacctgtgggaaaaatctggtatattcctggttcaccaggcctttctcagcccctagcctccggaccctgatcaccacggccaatggcaggtctgctttcttaagtatgtaagtgtgtccgccaggactcaggactgccttggttgacattttatgtaattaaaatggcgtgcagttcttgaaaagcaaataagttcagctatgtggcactctttgagagacaagtgcataaagtaggatagaatgagaatgagattaacatgtttaaggcatcggtggtcccagcaaaattgaatacaattgggtatataggacatttagttcagttgtatattaacagggttactgggtggaatttttctgacatttgaatcaaattaaaccccaaattattttaatttggttttaggcttaatttctccctctagccttgggaccctttgctgaataactatggatgattaaagcagtaggagaaaatgaaatgtacctgcttagtttagtcgaggcgttctttactgaaaaagtgggcaaaggcaaaactctcaagctttactggagagaccagtcagcaattatcctttcctgggcagcagaaaattagcataagattgagggaatcaaaatattttgattcatgatgtagtactgctggtgactctgtgaccttgggcaagtcatttaactactttgtggcctagtttagtttatttccataaatatggaaagttcaaatgaaaacattacttaacacagcacactggctcctagagtcttagattcaaattttagctctgcctcttagtagatatttgacaacggattaacattttgagtctcagttgcccatatattacatatggaaaatagtaatcataactattttgttatctgttgctatatttgttacatcacaagattgatgtgatgattaaaagagaatgcacatagagtgcttagcagagtgatagctcatagtacacacttaatattgtcgttggtgttattacattcttttcattacatgaagatacagtggagaattaggatacctttttagaattggaggctttgaatgagactttggtgagtgattgcaagcacatgaaacaagctgaataaaaatatgaaggtgagagagtaggagacatgcttggtaaagggtggaggcagactggggtggctgggacataaggcatgtgggagttgtggtgtgagaccagcctggaaaagggtgtttgggcaaaaatgtcagagatggaattggccatctgagtagttcacacttcattctgtacgtgataggaaaggtctaaactttttaaggaggggagtgatatgatcacacccatgttttatcaagataacccttacatattatgcagatggggttaaaacaaggatggatgccaggggaacatctagggactgattttaatggaaaaattaagaaataaatgaggaatttattaagtagtagcaagtagtgggaacagggaaatgacacatgcagacatgttataattgaattaatgataaggattcctttggctttttcttttgaattgaattgcgaagctaaaacagatcataaacatttaaaaacaaggttagtaatgaagaacataaaacataaaagcaacattttgtggggtgtgttagtttgctattgttatataatgaaatatacaaaacttactggcttaaaataacaaccatgtctcgtttctcataaggttagcagtcaactggatagttcctctagtctcaactggactcactcctgcatctgtggtcagctttggttggtaggcttctttgctcatcctgcttgggttgccccatgtttcagtgttggctggttacaggctggtccaggataacctcagttgggacagctgggctcttagccatgtggtctctcatcttccagcaggctagccagacttattctcctatcatggcaggcttccaagggagaaagcagaagtatgcaaagcctctggaggcctaagctgggaactagcacagtgacacttctatcacatcatattggccaagatgagtctttaggccagctcatttcaagggggcaggggggtggaaattgactatagctctcaatggggagacagcgaagtcacattgcaaaaaggtggacacagggaggccatcattagtgggacagctatcacctggggacagttgaaattctgtcacctggggacagctcaaattgtcatgtggggactcctcaaattgagctattgtgcccacataacaaatacttattcagcacttgccgtattttagtcactcctctaggttgttcctgacttcaggaagcttcctatttagcagggagacagacacctacatagatagctatgacagcaaagggattttttttttttttttttttttttttttttttttttgaggcgaagtctcactctgttgcccaggctggagtgcagtggcgcgatcttggctcactgcaagctccgcctcccaggttcacgccattctcctgcctcagcctcctgaatagctgggactacaggtgcctgccaccatgcccggctaattttttgtagtttttagtagagacggggtttcaccatgttagtcaggatggtctcgatctcctgaactcgtgatccacccgccttggcctcccaaagtgctgggattacaggcatgagccaccgcgcccggccgggatatgtttttttattaggtatacattcaattttgcctttccctgacctgctaaggtgcaaattctgaaaacactgaactctcaggctcagcctcttctagttcctcagctaatctacaccaagtctggccagcaggtagattgtagagttctgctgcttggagcaggcctctttgtctatttaaaagaatttcatcacactcttttcctctgatcatttgacattccttttccttcattacaatgaaacatacttttatcccgttgaagagcccagagaccttcatcaatttctctgggtattcacagacttcagtcagctctctttgtccatgtgccccagattcttatgccaagatcatcgcgtcttattactgcagtattttagcttttgaaatatgtctctgttaacacccacctaactctgcctattgcttggaacaaaggtggcatttcaccctgctgcctatctgtggttttcaaaaaacaaaacaaaacaaaacaaaacctatttccgttaccaattctcttgtcctatattttggagatcaaagaatgtctgtaactcattacatagggaatcctgttgcctataagcggaaagtagatgttgtacatgaaatcactaacttactcttttctttatccctggtgtgtgaggtgttttatttttgtgtgtgtgtgtgtttgtcttttcagtgtcctgccccttggtgattggggtgcgaaagagatgaattcatctggaagagagttgaatgaattttcagtaaagacattgagtaaagtgaagtttttgctattttttggtagtgtattataaaattgacctttatattatttaaatttgacattaagtgtataaattatagttttttaatactaacatttaaaacatttcccagtctttggaaagtctaggttttttggggggaaggacagtgactttaagtcactggcatcctctaaatgtggaagagctccaggtgtttacacagtgtatccccattcccatgaagactagatagatccattttccccatctgcataggctagtgggtggactctttccatatctgtactttcagagtccctggcccactgctgggctgcagctttgacctttggtgcagaggtaagatgaggcaaggagtgtgatggggagataaaaatatgtgggtgagctgggtctagagcaaagagcctctcaaagtttgattcgcctgagtgaaagacagcttaagaaggatgaacatagcagaactataaagtagtgagagttatattctcaaatctgcaagaaacatgtctcattacattactgtcagaaggagaaccatgttgaatcattgatcttaaaacaagagctgagagataatctagaattctttctgtattttattgtagtttcaactcaaagacaagcatggtatcttacaatctgggaaatttgtcccttgagaagagcaaaagtatattactgttcttaacctcagtggcaaagatcatctggatattaaagaggaagatttgctcacaagctgctgagaaatgttgagagtcacagaagcctggtcttgggctgttagcagaagagagatatatatataaagagagagggagcggggagagagagagagagtgtgtgtgtgtgtgtattctgagtggccaccttttttcctttcccctgtgtgacccccattgtcaggagaactgaaaactcttcatttttctctgtagccttcctgctgactgacatatgctttctaattatggaaaaagtgaagcctataacatcaacttgaataaattcagacaccgttttacgttcaacctcactagctcaaagtctagcccataactctgttgacataattgatctacagacacagaagagctaaggtttgtctctagtaatcacacacatactctgtgatggggctatgtgtatgtaatgacctcacattcatgttatcatgtcagacagaactgactcaatttgcttatattttactacataaataccatattaagagtcttagaaggaaccttaagggtcatttagttcaacatctcactgagtgaaggaatccctgacagctgaccccgtgactccttttcttcgaacatttcttgtggcagagaactcacctggatcatgaggagaatccattccattcagattgcaagagattttccttatactgagacaaaaatctactgtgctataattggcatttttagggtcatattctactctttggagttacttttaacaattttttcatgtgattgcctctgggtgcattatacatctcaggcagtgtctgagtattttcttcttcaaactaagcagcttaaatttctttagctggctttcaaattaaatgattttttagatatttcatgctggaaacttgatcaagctaccaatgatcagtttatcagtgtatcagtgtgttccacttacagtcaagtacaatagaattatcatctcccttgtttggtatgctatctttttattaaagtagtttaagatcatattagctgtttgacagccgggtttcccaaatttacaataatctaatatccaaagtaagccaaacattctcatgtgttctttatgaagttggtttcacatttaacccagacgaatatcatttgattatgttgatctcaactttcgtgcctacccatgtatttttgaagtttgattcttgccaactgacaccttcattattctttctaccatctggccatgtgcatatttttaaaattagtataaatattcttccccaagttattgattaaaatgctgaataaaacaggactcagtaagtttcctttggttatctatcagggatctctctccatgttatttttttattttttctaccagaactacataaggaactttgttgagtgtcctgctggaatattggtctacatctgtgatcagaaaatatttctccttaagaaaaataaaatatagtttcatactacatctataaaatttattccatttttttcccttttttgcaagttttataaaccatgccacttaactatgcaaacatctctgtaaaggcttttttttttttttttggcaaaacctgcccttacaataccttttctgggccttgaaaagaatccatttttttctccacaagtaatgtcatactatctagttctgcaaatattttggttcttagattatttctcactcttgacatttgactttcatctttgtaaattctcctgccacgtcatgttataaacccttgctctctgttaacaatttggctcttgataagactggattctttacattcccttcccactatctacctccagcccttaattcccaactctccagtcattaatgttcccatttcttttggaatctacaagactgtttttaaaggaatttcgggaaacatagtgcatctgctattctttgtggttgaaatgaagccatggttgggaatggatatgacaactgcttaaaggccacacaaataacattctgcaatatttgggagggtaaattataatgaacgtgtttctctggctgaaccttcatgaaatactggctagaattcaggcacagagcttgaagttgcttatgtaaatgaagagacttttttttttttaaatagctctatggtaaataaggatgcatacaataggtaaataaaaattgtgcttatcactgtcctatacttgggctatggttgggtgaatttacttttgtgttacttttggtccatctaggccaggaaaggtatcatctagttagtaaaggtatggtactcttctaggtaattatttccgcaactgagaaaaagcagtggctgagaaatgagtttctggagagagaattttcctgatatggtgacacccattcttttgtatattcaataaaaagttggaacaatggatagtagtattgggagaagaaatagcaaaataatgatcatttgataataacagctgacatttattgacgttttattctgtttcaggaattgtgccttctcactaaattataagactcttgcgacgtgtgttctatcattattaccgtttgacagatggggcaactgaggcacagagaggttatttacccgagcttgagcagctaagaagtggtggagctatcagtagctggactaggtcgtttggctctaactgcagtgttcagtatggtagccatgagccacatttagcaactgagcacttgaaatatggctagtctgaactaagatgtgttgtaaacacaaaatacacactaggaattaaagggtttatatgaacagaagcacatgaattacctcattaataatttttgtattgatttcacattgaattaatattttagatatattaagtgaaatgtattattaaaatgtgtttgcctatttcattttatttattttaatatatccaccaggctatttaaaattacatgtgtggcttgcattatatttctgttggatagtgccattctagagcttaattcttaaggattgctgtttggcaaaataccaaaaacaaaacaaaaccaaaaaacatctataaagataaagaggaccaggccaggcacagtggctcacacctgtaatcccagcactttgggaggccgaggcagatggatcaccagagatcaggagttcaagaccagcctggacaacgtggtgaaactccgtctctactaaaaatacaaaaattagctgggtgtggtggtgcacacctgtaatcccagctacttgggaggctgaggcaggagaagcacttgaagccaggaggcggaggttgcagtgagagtgcaccactgcactccagcctgggtgacagaacaagactcagtctcaaataaataaaataaaataaagaggaacaatgcaagttacagagcaggggttgggtcgcgttaaggaaaggaagctggttatgggatatattatatctgtaacctagaaagcctacagaggcaattctgggtcatttgaaggggttaatttctcaattaaagaaattcctcaaattaaagaaaaatatttgatcaagaatggattgatttcctagaaaccaaaaaatctcagagcactggtcttggaccaaaatataaaacgaagaatgaacgatcaagtgagggacaggattacttaaaagtacgggtttcaggtgatttgacaacaaggaagactggggagagatggaaaaagatttttggccaaataaaatggaatcaagtaagatcgttcttgatgagccacttgattaaagtttagctggtaagcactcatgtggttgtgcagttgttaagataaggaactctctatactagttagtaaatggcagctgctctgaggcctctgggtgccctgttattcccccagactttcttgtaagtcagcacctaaagggcaaatacctggcagaataggagccacaagaccctgtcccctccctaaggctggcttctgttctggttggctgttaaaggtgccgtgcttatggggaactgtaacttgtaacttctctaattttatatgatttgcaccatcatgtaatatgatcgaagaaagttgtgttctccagaatacctttcagagagtgtaatacattcttcagaagaaacaacttgaaaaatccacctggggtagaagctgagagtttgaggggattcagagtgggagaagctgttcttgatatagagaattacatgaataagataaaaataagaaaaccatatatttaatcttcaagaatgggaggacaattgaggaagaaaggagcgggtcagaggtgtggaacaaccatggagatagggaaagtccactctatcaacaacacggtctttccctgggtctacccaagtctgcaagattattaagctcacagaatggatgcaacaggtagatttttttctcctttgtgtagaaaccagttaaggcttgactttgaatttcaattgttttaggtagaaccatagcagacaatcaaggcagacataggaaattggaaagagactgagaaaaagtagaccacagatattgtaaaaaatttaggagagattgtgctagcctcagagttgatgtttggaccaaaaccaataagactgcccaagaagagggaggagcacctgtagcttgtgagctgcaggcaaatacttagcacctttaatatgtgatgcatctattctgaatatcagtgttctttagggaaggagaacaaaggagaaaggctaaggaatcctaagactttggaagagaaatcacccatgttctccaggagccagtgatggaaaggcaccaagcgttaggcaccttctcttgtttaggggccttgaatcccagccattgtggatcttgcagccacagctgcagccctgcctcctcccaggtccttattctgaagatgggtattgcggaatacttcagtgcagtgtggatagtgacctcctttaactcttccttctgcctctttcccttttcccaacttgcctttcctgcagattcctggcacaggtgaggtggactgaaattgacatggaaaagaagaggtctagaggagtctggaaactattgagtggtcaggatgtagatgagagtttggccaggtgatcactcttgagcaaaagaagcttctccaggaagttggtgagaggaagcagcttttggtgtcaattcatgcccattcctggccccatttttaactctttattttctgtgtggcccttgcgtttctagtaccaggaggggacattccaaaggggatgtgggctgaaacatccatattcagaagcgattcttacttagattcttcttgttcacctcaggtcaggacagagagggagccactaggttaatgggatagggcttgggattcccttggctctgagaacttgcaccttagggacacccattagtgtccccttgctctgccccgctgtattattaatctctcctgcctgcattattgctcattgtgcagcacaagcagcacagccaaagctacacttttctaagtacagaggtaggaaatgaaaggctataaaataataaatgtattaattttaagaagttttgggggctcctgtctcctctcctccatttctttgccttgctttgataatcatgttcctctcactgtctttccttttttctttgttttgttacctatattcatctttttatctgaaaggttttctgcttattctcttgtctccgctctaatccccactaattcccgctccccaaatcccacacacttgctttagtattaatcttgtttatttctgttttttccctaaaatatgataagaaatgaactagcacatgtgtgctgtcgtgtaagattatattaatttgttctcctcagtaattttcaaggactatatctttcctgactctttaagtgcaaagagaaattctgttaccaaaatttccaaaattcctaaaattcagaatttcccaatttataaaatgggaagtttttttattatttaacttttattttaagttcaagggtacatgtgcaggtttgttacataggtgaacgtgtgccatggtggtttgctgcacagatcatcccatcacctagggattaagcccagcatccattagctcctcttcctgatgctttcccctgaccaacccctgacaggccccagtgtgtgttatttcccccagtgtgtccatgtgttctcataattcagctcctacttataagtgagaacatgtggtatttggtttctgttcctgcattagttttctgaggataaccacttccagctccatccatgtccttgccaagaacatgatctcattccttttcatggctgcatagtatcccatgctgtatatataccacattttctttatccagtctatcattgatgagcatttaggttgattccatgtgtttgctattgtgaatagtgctgcagtgaacatacgtgtacatgtgtctttataatagaatgatttatattcctttgggtgtatattcggtaatggaactgctgggttgaatggtacttctgttcttaggtctttgaggaattgccacactggggaagactatttttgtgagggaaaatatatgtgactaatgaacatgaaaaatatttagcctccctgtaatcctatagaaattaaaacaacaatgacatatcatattttacctaccaaattagtgaaaatttaaaagaatttattaactatggggcatggtacacttttcatatactgcttatgagagtgggaaatgatgcattttcttgaatacaatgtatacaaatgtattaatgacttttgaaaagttaatatgtttggctgattcttccctaattctatttctaagaaactatcttcttcttgacatcagataggcagacagagaactgcaaacaaatacctgcctcccagtactatttcctaagcacttacttggtgcccagcactatgctaagtgcttcccgggtaccatctcatttacccggagaggcaggtgcattcctaactcacttcacagttaaggaaaaacattggaagagaggctaacttgcctaaaataaacagcctgtagatgatggagtctggtccctacctggacaatcttaccacagagctcttactcgcaagccccacctgtaatccagtatagttattacctattatgttatcttctgtttatcttttgctcctctgctagatctaggaggctcttgtctccatcctcagcctttaacccagtgtttggtgtttattaggtacttgatagatatctgccgaagggacagcctaattgaagctttactgtcctcagaaccaactcgtcacttctgtttaaattgttcccactgctggaattggcctctaatcccatgaatgcctggtaataatcatcaccagcggcagcaccagcatcatcatcatcatcatcatcatcattttacctctcctgcatgggaactttcctgattcatgatcacatgtgatctcttcctttcctatgccgcatatatttgttttcattcattttgtgataattacatttcactttacattagtgtcacttgtatattctgggtgtaaaaactgtaaactctatttgatcaaggataatttcccattacttttggtaatctttgtgcctaggaaagggccttttatatggtaagtgctcaggaaagattgaacgcatgttatgcgtttaaaaggaaatacataaagctaaactgtttgccagacatgtccctcaatgacaactcttgataaaatgtctttaccaaaggcactgcacatgttatggcaccatttaaaaatgatatttactcttgctttgtacacttgattttgcaagattagtaatccagtggatagtaatcccttctgctataaccctgtcctcaattgaggcctgtaaaattattaaacgcctcttctagactcagcactattcccattcatattattcctagttgctgtcccagggatgagcttttcctgacgacattgacttgaagtcacactggtttccatgtattaggaaaatgagccacagttcaccatctggatgctcacctttcaccacattacacttctatttttttcactttttgataaaaacccactagcaaaattatctaaattagactaaagtggttctatctttatcttttgcgtaagcaattttgcacccatttgtactggttatcagctggggtataaagagaaatcacatcccttattttaaaatttactactaaaactcctgtctgctcatattaacagaaaagcagttttcccttctgaagttctctctagtatccacaccagatttttcaagagcactaggagtttactcaggccatgggtcagcctgcttctagacctcagatgaagagagaactggacagtctgagtggtccagtactagacactgttatacttatttttctggtttgtcttaggcttgcgatattttaagttagttcatttgctcacccagtgttcccaaggcaggacctctgttctagggtgtgtatgtctggaaggacttccagattcagccttatcctgtgtgaaactagttcccctctatgtacctctagtctcttatgtaaagctggattctttctcaaattccccactgtctcatggaatgttccaccatttttctttgctgtccatggtctcagtctgaactgtatcaaggtacagaagaatttctagtaatgttgaaggggtttggagtatcagtctctcttttctcaacagaatccttggctccttatggcttttctccacctcttctccagagatcagtgtgcccataccaagaagaacagtttcgtcatactccaaaagtcttttactcctcctgagaaaaaagaggcatttgcttgcctttgagcacttttgggaagatgtagacttctgttccaaggtgattctctgtgttcaccttaaagaagaagcagacaactgcttttacaacagtgttaggtgccatggcaccatgatccacctcatgtgtatttgacagatgcgtagctctgcatgtacagatctgagatgactcatttctgcatttttgtacataaacattcaatattgtgcaggtgtgtgcatggacacactcaactaaggacatgctagctactttagacctaaaaaaattagacttgggggaaatataggcctccaaatagaggatattttgtctctttcataaagactcgcagttcctttattgctggatgggtaggaacttgccaagtacatgtctgtgagtcactaggtgggtacctggaaacactggtcacttttgcagttctaactgtcccctccaacccatcaccccattggtctggggctgctcaagagttcttcctatgattgtgttggagtgtgaaatccacccatctatagtccatggtatctctgggcccttccagaggatggaccttagagcatttacttcacctttgaggatgtgggtgagaatggaggctgagactttgttaaatgagaatacatttgctatagagcagggggtggctttgatcctgagaaatagcaatggaaagtgtgattattttatagtcctgtgaagatatttagaaattggttgatttgtaaaagaaaaaaaaacctcttacaaggttgcaaacttgcctgtgatagaattgtgtcttaagtgattcagatattcagaatttcaagttttacttccgccttacctcttcttgctcttagttcaggtatttactctgtgcagacatgatttaaatactgcttctttatcagtaggaattactttgcattattttatgtgtgtgcttagagaattttatattgtaaaattatgatgcgctgatattaaattgatacttcagcgagtacactgtagctgatgaatcatcccaaagaatcagggcaagtgggtggagcttgtcgactgagcagggggcatgaatgggagtgagaagtgggtggtttagcttttctttatgctcagagcaaaccagtctgcagatgagacaaaaagctggtggcattcctcagattggggaagaactcagagtggacaagcctagaggaaatctagattttcacatgggaagaaagagattgttttccttaagatagtgaagtggaattgtggctggcaaaggaaggtaacctgatggtaaaagagccatcagtggcacaaaccaaacctccccagagggagctgatccatctgagaccgggtgatagctgggaataatagctgaagaacgtgacttttatggaacagtggaatcagtatcctcaatgggttgttgaacattcttcagacatctgactatatagtaagaagcaggaaagaggcaagatatttctcttgggccaggaatcatagcaatcatccagctgagtgaatgacctaaagtcatgggaaaaatcagtgggacccacaccaggccctgaggaggtggagtgttctgacatattcagaagggacaactcaggagcccatgctgttctaggttgcattgaaggaccagtcaaactcggaagctgtgtttttgatcagatatgactgatgcttagatgatgaggacaatgaaagtgatggttaatttaacaacgtaaccagtttgtaaaccaatatgaaatgaaacgcatcctcacgtatattcttggctataatatgtggtcaatagattcacacttaatgaaccagggaagttactgtgtgctaggcactgtactgagcactttcttatgtagtgtttcatttaatcctctttacagttctatgagctaagaattagcacttttatattctggaggaaaatgaggtttggatatggtaaataacctttcaaagatcacacagctaagtattcagatttgaatctaaatttctgattccaaatccagttcttttttttttatagcagcaatatgcttctgctctgttttgaaattattgctttgttaccttggctacttactaaatctttctttgtaaaactgtgtaggtttatcaaaacgaaagtctaaattttagttttttactgtattgtctaatctcatgctgttaataaagacatacccaagactgataaatatataaaggaaagaggtttaattgactcacagtttcacatggctggggaggcctcacaatcatggcagaaggtgaaggggaagcaaggcatgtcttacattgcagtagacgagatgacttatgtaggggagctctgctttataaaaccatcagctctcgtgagacttatacactatcacaagaccagcacaggaaagatccacccccatgattaaattacctcccactgggtccctcctatgacatatgggaattttgggagctacaattcaagatgagatttgggtggggacagagccaaaccatatcagttacttaggagccattgtgaagtggtggctacagaaaccagttgtcgaaatcattcagaaagttgaggcacctagggaagaaatacggggagtaaaactttgtaggggtttctggaggctggtgcccctggttcttgtcagatagaatccattacagaatatctttagttcctcacagctttccaactctgcacatatatcctcataataaattgcctgaggatgatggcttccagcttctcactcataagtgggagctgagcaatgagaacacatggacacagggaggggaacaacacacaccagggcctgtccattacagaatacctttagaccattattctcaggaataaatagcacatatctaactctctttgtggcttgtgttgagacgctaataccaagggctaaattgatgtttatttgacttttaaatctgtgctaacaagtaactctgtaacctcctctcacacaccaaatttctgtgaagcctattaaatatttcagaaactagtctttctgacaacggcttaaccaccattttacagagggtaaacttaatatcttaccttgtcttattctgatatagggtaaacttaatgtcttaccttgtcatattctgatatattcaaagtgaatcagacttggtcagtgtcaatgaacattaaattcttttgaagtgatcatggacacttcattggccagtgtgaaacacccaatgatttggaagaaacaaagctgtaaccttgatggtcagagccagttctttcatcctaaattcttaaggatgtggggaatgatgtgatttgaacaaagtgcagatcagccttatgtgcaatgaggaaaagctgaatactggtgaatctggcctttgttcaggacccactgataaggtacttgagagagcagagcaagataggagaaatttcatttcttgcagctgcagagaactggatgtagtgaaaattttagaaaccaagaaccatataaagatgagcagaaactcaaacaaaatagaagttcagataaaataaatagctaactttccgcatagtttaacatctgcttgatattgcacaaagaaccttcctcaagtcctaatggaggtttgtgtgagtcccactggcttcagacatgtggagcagccaccatatcccagggtttcatgcagcttcactcatctttgattatccccacataatctgggataccagcccccatctacctgcttatttattatttggggggcacgtttgtaagcaacttctgattaacccttgctatgcctgtgaaggcgatatggttttgttagcatctattactcagcttgctgatgcaaacagtatttaatctccaagcaaactataaatcttcaagtgcatgatttgactttatcgccaagtaaattgtccctgcttgctatgcccaattctctgttagccatgagctgcatactgaataaacaccagtggctggatagatgaaagaacagatggagaaatgctgcaaatgtatacccttacagctccagagacgtgcctgggaacttgggagcatatgcacgaaacactgagtatgaatgtggtgagcttgccatccatcttgagaaccgtgtgacaaaaaaaagccacacttgaatgaatattacaaccagacaggggatgaaaacagaatgggaaataagaaaagggccttgagggggtgggagggttcttgtgtgagtgaccttgcattactgagggcactctgtcccctgtctcaggccaggggactaaacctgactctcaccttagctctgctgtgttgcattctgagcaaggtaaacgtcatggaggcagatgtttgcctcatgaaaatgggaagctgtagaataaattccaagaatgatactgtaaaacaaggaaatagtaactagcggtagcctttatacctgtttattttattttattttatttattttttgagacagagtcttactctgttgcccaagctggagtgcagtggtgcgatctcggctcactgcaagctccacctcccgggttcacaccattctcctgcctcagtctcctgagtagctggggctaccggcgcctgccaccaagccaggctaattttttgtatttttagtagagacggtgtttcaccgtgttagccaagatggtctcaatctcctgacttcatgatcctcccgccttggcctcccaaagtgctgggattacaggcgtgagccaccgtgccggccacctgcttatttttaattaggctcttttaattagcaggagcaaagactaactaagttgttgcacaacaaccaacaaaataaaaacaaaataccaggcaatttactacgaggatatttgtgcctagagttggaaagccgagaggaactaagaccactccccagctggctccctactgggtcttcctcaaggacatatggtctgtattttgaagatcttgggttctttgctttccacttgcatctgagccacttccttctctactgcaggcatcccctgctatcccatagcttctgcttcctcattacttcacagtgcccatgaccttggttgtcagggcccttactctgtttcatgttataggtgaaagacttgccattctttcaagtttttttggttcagactcctgagagagacagaggatctgatggttctggctcatttttctagccaggcccagactgcaggcactgggcagctgcaagatggtctgcttcggccaggtacccacctctgattaacaatacttaatgtgcaaagaaaagctgaagctgtgaaccagggcaggtagtctaaaaggaaaattgggcatgatggatatgatgagttgacatatcaaagaaggaagcttaactaattctgactctagaaggcattcactgagcaaagtgaaaatcctcttttagtgcatatttaataaataaggacaattaggtagctgaagagttttattgtggtgaaactttgcctttctgtgaaggaacagagaggggaatctgaggttattctcccttacattaggaaaggattaagaagttgagagaattaaggagagacaaacttacccttcgtcaccgaagatttcaatattaataacttactgtaactaggttactaatactatggagtttcttgatgagaggtcttttggggactcttatgaaaattttgataacctgtgcaccttcatggaactcaaaaatatgaacaaaagaggacattttcctacaaaccaagatatctttcatctgtgtgaaactaacttgcaaacttaacccatgatctggtaactctgttggtaaattgttacatagataaccaaaataagcatcaacatacagacaaaaacattgtgccttactctatttgcacctggaagtacctctagctcagatcatatgctgttttttggcaaaagttgagaaactatgttgctgtttatagtgttaatacacatgggcgccattgctagtgtatatccacttaatgtcatcatgccaagaataaaagcagcctttaaaatatactcttgattcatcagtaagaaaattagaaaaaaaattacatttctttaacagacatggaggcagttttgagaactgatagcatttaggtagtcatctacgtctttttaaatgaatggagcacagggactagtcagttgaactggagaaggaaaatttggcattagaatactttttttttttttttttttttgagacagagtctgtactttcgcacaggctggggtgcagtggtgcgatctccgctcactgcaagctccgcctcccggcctcacgccattctcctgcctcagcctccagagtagctggtactacaggcgcccgccaccacgcccggctaatttttttttgtattttttagtagagacggggtttcacggtgttagccacgatggtcttgttctcctgacctcgtgatccacccgcctcggcctcccaaagtgttgggattacaggcgtgagccaccgtgcccggccaacattaggctacttgtgtgagttgcttggatttaaatttgaaagcccacatcatctctacggtaggaacgctgaaatcatgattgatttcctgaccagtgtgtataattattaaaactgtcggaaggctagaggaaaaaggccagtgtaaagaaatcaaatacactgagagaagagaagagatgaggaattatcattcccccagcttttctgaagaataaaaatcttaacaaaatcaatttgcaatcatttgaagagaaaaaggttttttaactgggtagcctgacttcataaaggacaagtcctgtcatattaatctaatcttctgagatgaaaatgaaaggctgggtagatcatggaaaaagatatgtataattcatttagactgtagctgtgatttggacgtgatactctatggtatgcccattagctgagactcgatatcagaggctcattgtccacctgaggacaaatacaaggaacagttcaaggcccagtgtttcttatgtttcttttcacagtctggcatttggattgaaatgcacatggatgtttactttgctcactgcacaaaactagtgggagaactgggaaagagagggataagtagaaagaagcttgaaaaacagagttgtccagacatagtgccctctcttctcaccattcttaggatacttatattctaaacttcatgatggcatttaaggaacatcgtcaataatttcatatatttttatcttccaattagcttgcctgaggttgatgatggtttatacttcatttctacttcctacagcacctgataagcatttaataaatatgtgattgattagcaaacaataatgttacaaagaatcagttgtatgcatgtccagtagaagaacactgcagagtaataatgtgtaccgagtccatcactagttagcagtgccagtggatagatgcatgggattgaagcttaaggaattaatgaaaataatctctgtaatatactaggcagaggttagacttttactagactactgtaatcactctgtgcttcctaaagaaacaaggatgtatagacagttcagatgagagctacagagatgaataaaagaaacttgagaacgtgtgctgcagtggttggtgggtgcaccctgagccagatctacacaggttctctttccagcggttaccctgggcaagacccttcatgtctctgaagctcactttctctgttggtaaaatggagaaaatatcagggcctgctgcaatggaatatgaaaatatattcacatactgcatggacagcatggagcctgctataagcactcaatgaatattgtcataagaactataagaaatgaattagaaagggagattgtttaggctcaggaagaaaaggctgagagtgggcttagtaataatctttacatacaaggtaatgacaaaccatcatccatcttgacatcagttttgttcatactgacaatattcttgagggcttatcatgtgccttccaccaaggagagcatgagacccaaagagcttaatctgcagcacgatggacgtaaggcagacaaagagatgaatttctgaaagtcaggtttctggactcaccggcttaggtaactgaagaaaattgtggacttttctttgaagacttgtaaaataatctagtttcacctcatgttctacaaaaccggtttagttgtggtcctactatgagctggactaatgtgttctcagggtactctggttagtgtctgttctttgagatcttgggctggcatttaacagagagtttcatctgtgcttataaaagatgagcagattggcacttttaggcagtaccgaattaacatcaaaatgtcattgctgagccataaggttgcccccattttgttttgttagcatggatcagaattcacagttggccgatgtgagcctgatagcttcaggtgagttgatttactgccagttctaaagataacgagactgcatgttgcactcatacttgtctgggatgattcatttataggcagaggccccattgtgaaggattcagattagccattaataagtactagtatctgattataacagtgactgtgtactccagagtctgacgaggatgggggcaagaataagccccgagtttccttctgtttgaaataacaaatgacattttctttcaaggacctctttcttgcttgtcaacttccatcagaggaaaagtatccgggtgaaatgccatcaacaatagaaatgttggagaccactgaatgtggtttgaaagcaaacaagtaaacaaatttcaaaataaaaatgagtaaatagaccattcttttacttgccaagttcttatttctagggaagattttttcttatttccatcaacgttggcaccttccatgagtgatttctgctgcttgtccaggcttggtccatctcccagagtcaagttgagatagcaacagcatttcagctacccaaggtcccacaggggaggatggcaacactttttgggccaacggtgttagccggttagagcattccgttggggtctttatctgtggaattaggactgtgtaaaaatggaggcaaagaaggaagaggtcacagcctgggctgcagtgctgattgcagcaaggagggacaagatgggctccaggaatgttgacaggattagtactggtaagtcagaggggatgggctgggccagagagagtgtctcttgactgtgttggcaactggatccttagcattctgtacgttctaaactaatatcctttttttttttttttttggtatggatatagagaaggataggctcttttctaggactgcggacacaattgtgtggttagaaaagtagttttcgtgtgtttctccctgtatcaggttaggagctgggcatccatcctagtggattgtattgcactctcaatgaaacttcacgtgtctattcccaggaaagttagagatcaagaaaagaaaatgaaggtaagcagttagaacctcagaagtcttaaacatccatttttagtgctaataaccagcagccataaatgagtaaaagaaaaagttgaataattctggaaaaggagagcaattttcagtataaagaaaacaaagaaaatctcaaataaacttggatgcaaccaatcaaacactgaacacaatttgtattgcaggccaaggtctagggagggtcagaaagctgggaaagattggacttaaccctgccatggggttgcctgccacagggtggaggtcagcaagctctgagtccctatttaagaacagataacccccttggtgggattcaggctagtgtgggtgtgcaggagtttgacaaagtaatggaaaaaggcaacacagatgtgttgacactaataatgccctaatcatctcgtatagaacaggaaacggtagatgtgtcagaccccagctggcatctgtaggtacaggaagcccagcatcaaggatttaggcagcttctcatggaccgtccaatgtagttggaggctctgaataaggctcctcatccacgggagactggaataaaaatcagaacatgaggaagtgatttagtcctttggattgagtacgtgggaggcacacgaaaagacaggcttcatctgggtggccatgtctgaacccagccaggttcacaatcagtgcaccaattcctgggtgtaaagcagcccagccagctttagaagatggtgtcggtgaggacagtacttggcctatcctggtttaaagatcagaaggcagtacttggtgactaaagttcaaagtcttatagttgaatgaagctgggacatgcaggtgctgacaagttgttggaagatttttttttttttaatctgtctctgtgcaattttattttcatttctggagcccttcaaaatgcattgcctcttttagatggaggaccaaattggtttgggagatgtgaataaattcaaagcctctttgattgtgaacagccgtactttgctatatgtgaggaagtagtgatcagttttccaatctagagacctagaaaaacacatcgctggatgtttggtggaaaaaacaaaaaacaaaaaaccaaacaaaaaaaaaactttctcagaaaacttctttctggatttagcctttggagacaatggcttgttaatctgtggccaaacaagcatgactgatccacattttaaactcagccatgcctagtctctcactccatatggagctgggacagaagggcaaagagccctttgtttcccagggatcccttgaagaggcccatgtgtacaagcaagatcactgtatctagaaccagtgcttgtgttattttcagcaacacatgaggtactagcactcatagcttaatcaaatataaaatgccttttctacccttccgcttctctgctccccttggtatatgaacgtgatgttctgatcaaatgtgtttgaagagatgggaatgttaatttatttgagacaaatgtcaacatctttactctgaaaaatgccgctagtacgtcaagtgccatcactggcttgcacttaactctgctctttagtaataatcacagttcttttgtagatgctgtcctttcggcttaagttaaataagatgattttgatgagataaggcaattttggatttagtatttcatacctaataagaaatgatggctgggcgcggtggcttatgcctgtaatctcagcactttgggaggccgaggtgggaggatcacgaggtcaggagattgagaccatcctggctaacacgatgaaaccccgtctttactaaaaatacaaaaaattagccggtcgtggtggcgggcgcctgtagtcccagctactcaggaggctgaggcaggagaatcacttgaacctgggagatggaggttgcagtgagccgagattgcaccactgcactccagcctgggtgacagagctagactcccttccaaaaaaagaaaaagattcatcttccctttggttattaggtttagttttatgatgcctgtcattttattctataaatgcccagacctatatttgtgttgaccacacttgattttattaaatttagtgtgatattgataacgctactacttaattaacacttagtttaatatgtacacaccttttctctattcatttcatttttttccaacctttcctattttcctgccttcttcccttgtgtttatttaaaagtacatttattcagtcacagaacctgattgttgctgaacttgtcagcttgctcttttatagaaaggcacctcttaataaaaatacaagtcagtccatctgagagtaggtttgattgcttttaggaaaggaattttactttaaaatgaaatgaaagagtcttgttaagattttagtggtcccgataccttacaaaggggcacaaacacattctcaaagtgctcttactatcctccaggacctttgctcccttacttctgtaattcgtttaggtatcttagtgatggggaatctacctgttccttcttctcctcttattacacttcctgttgttttcttctggctataaagttgtctctgtgacctagaatatcaagaatcttgtagacattctcaaagtgaatgaatacctttagtttgtttctctactgtggtttaaatttggcgattaaagcacatccgaagagagactcagtcagggaggaaaatggggccaaattcaagtagaaaggacaattatcttctgaaagaacaaataataaaaagaatgctggcttctgcggaagttgtttagttatccagagtggctcttaaacttgccagatctgcttgaatttctttgaaaactcagaatgttctcctttgtgtgcaagggtttaaagaaagaatgggtctggcatttaacaggcaggaaagatcatgattctgtatcaatatgcttccattgtgtgtttcagtcatgatatttttgattaatggtgaggctggagaacatcggaaattttccctatcttgcaagacactgttcgcaaaactctgacactattcaaagccatgctaaagaactaactccagccttagtcaccagaaaaaaatgatggtgtggtatcagaatttctactcatcaaaggagatgatcatttaggatttggtgagtagaggaaagtatttccccttattttgggaggagaaagagattttttgtctcccatattctgcttctactctgtgctaaatgtggaaggagtgaagatggagtactcagaacttctcaggacagctgggtaaccctggcctcttagcccatcatttctacatttgccttccttaatctgatggagaaagtctcagggaaagcctaccagttccagagtttttcagacacagattgtcctcaagaactgaatttagaagaaaagaaggagaattttctttattaatataataggaaagagagtagagggaaaccagattgatttaatctgaaactatactagtgtactaacaggattatattccctatgatattatacagtactaagatttgaataatgtgaaagactttaagatgctggaaaaatataatcacagttggatagccaacaaagataggttagatttgagagcatctggttgcagcatccatgaccccatttaaaaaattcaaatatttactgagagcaccctatgggccagacctcaattccataattgtgggttatagcaatgaacaaacacatgccgatccctgccctcctggtgctcacatttaattgggaagaggcaggtgagttcataataaacatgtcaaataagtaatcatgtagtccatctgatggtgagagatgctatgggaaaaagaaaaagcaaagctggacaaggggatcagatatgcctatgaaaagtgaggacaggcttcagcattccgtgttgtggtcaggattgagagcactttgttgggaaggcaagattttagcaaagacgtggaagaggtgcatgtgtgatacctgggtagctggagaaaaagtgtttcaggcaggggaaatagctacagcaaaggcctggtgcaagaatgtgtgagtgtgttcaatacagatcagagtgcatggagcagagtgagggcctgggacccaagggccaatatgggatcaaaatcaagggtgctggctgtttctttgtagtacactggggagtcttttagggcttggggtatagaataacatcttaagtttacaaaagatcatccttctttgttgagcattagactagggggttaagacagagccagtggtaccattgagcatgctcttgcagggattggatgaagaacatcaaatgttgctggtagataaggaggactgcaagtggacattggcgttgtcaatatcaaagtcacctgccttttacaagaggggtttcagtgaagtggtggtgttgaaagtctaattggattcagtttatgagaatgggagaagaggaattaggagaattgagtatagatgatgcttttaaggagtttgctacaaagggatgtaaataagtgactatagcattttctgccactctggctggctacaacagggatcccctcacattttgtaaaagcacagtttatgtataactttttaggcatgccttatttctgtgaggtagatatgtgccatcagcataaaaatttgaaactagctgggcgtggtggctcatgcctgtaatcgcagcactttgggaggctgaggtgggcgggtcaccatgtcaggagatggagaccatcctggccaacatgatgaaaccccatctctactaaaaatacaaaaaaaattagctgggtgtggtggtgcgcatctgtagtcccagctactcgggaggctgaggcatgagaattgcttgaacctgagaggcagaggttacagtgagccaagatcatgccactgccctccagcctggcaacagagtgagacttcgtctcaaaaaaaaaaaaaaaaaaaaaaaaaaaattgaactagatgagatcatcaaattcatttcagttactctcccacccagtaaataaaacgtctacaatattaatacaatgaacactagaaaaatgtttcatgtgtcagctagggatctagagatgaacaaggtatagtttatcctcttgagaaacatttttagtcagataaggcaagtatgcatgtttactgtgtaagtatgatgacggaggcatgcacaagatgtgataaaagcaaaggggagatagaagtaagttgaccagggaaagttagaaaagataacatacctaaaagacctgacatttgaattgggtcttaaggataatcataaaattttccagcccatgtactggcaaaaatccctctgttagataataatccagctcttgtttgaatgcttacagtgacagagagctcactaccttaggagacccattccattttaagaacctataatttttgcaaatgcatttcttatattgagcccaataatgccttttaatatttctactcattgttcccagttctcttctcctctgaatttaatgagccaagatttgtctttctaccaaataagtcatttcagtatttgaaaatagatatgttctctttgaagcaatttctttttggtgttgaaaagggggaaatgggtagagtcaggttcccagggaagcagactctgagcctgaggttagtgtgcagggggtttattagggggtgcttttgagatcagcaccatgagtgggaagggaagattggacaaggctggacaggagaagtgcaggtgtgatgcagttttaatggaagcttcagaaatcctgtgggggaattctgaagataaactgaccctttggagttgtctagagttagggcaagaagattaggtctttacacctgtaacagccagtcattcagtcccatttaccccaggaaacggatatggctttggggaagtgggcttttttagctgaggcagtccccaagggtgttgagtggaagccctattgccaggggcactaccagccgctggggcacttaatcctttatttatgaagtggatccataagggatctggatgatgcagaagaggaatcttaggtactgctaattttttaggcaattattttctgaggcagataataagatgaaaaagcacctctttttttttattcttattagcaaataaacaccacaaacatcaaaatgatgggggccccacattatggttctagactgttagggtctagtgtacaattctaccttccctgtgctgcttattcatctctgttaggatggccctttatataggaatatgttaaagatgctcttgaggtgagttgaagaaggacattcaggtaataaatttgactgggattcttcactaggaggagactgctccaaggacccctgcatgtcaacattttgtaatgacattaggagataaaaatgtaagtggggaagcatagtgagctacaaacagaattatatctctgtccttcatcctcgataacttgcggtaatcacagtgcatgctgggtgcctgcaaagatggatgtgtggccaccagtcctttctactcgatgcacacatgaagatttcccttttatttgtggctatggccataatttgcaaagcctgtcaccatttgcaacttacagctagactagagctttactgaaaaagagctgtcccattcctgatcactgtataccatattgatgtgtcaactaaatgaataataactggactactcattataccaggaaacattggcccaagctattattctgtttcttgacttctgtttggcttcattagcctcctttgggtgccagataaaatggtcatataaagcatccttatttaataagggcttggcaaaataaaatggttgagctgggcatcaatcggagcagaggaatcaggaaaaggatcagattgtggaggacagtagaactagaaggtacggtaaggatgtagttggggatgatggagccatatcaatttttctcatttctcactctcattatgcattggcttccttcacacagtagctagcagtgtctttacaagctacttgcaactgggggagagagagtattaagagaagcctaacagaggggagggccaagttggtatttaatagattggttttcttctaaattcaatctaattaacaaagcccatttactatggacccccgtggcttttgtacctcttgctatgtatttcagccagctgtggtttcatagcacatgaactttgcatctattcaagagccttcttgtgataagatctgttcatttatcacagaataggtagacctgctttgtttgccactgggatccctttcatcccaagcttgtacatcttaaagcatattggaaagtttcttcactttgctataaccactgggcttgtggaagctcatgtgataatatttctcatttcggaatcccccagtttttctttagctggaagcatgacaggaaaaacaaatgggtgtctctttaaagtgacagctattctaggggtgtcaccttgccactggccttcctttcctgtcgtcgtcctctgtaggccactgacaattcttggaataaaattgtattgccccagattcccacttgtctcagtcctttcaggctacttataaactgagtaacttataaagaacagaaatttggatgggcgcagtagctcacgcctgtaatcccagcactttgggaggctgaggcaggtggatcatgaagttaggagttcaagaccagcctggccaagatggtgaaaccccttctctactaaaaatacaaaaattagcctggcatggtggtgggcgcctgtaatcccagctactcgggaggctgaggcagagagtgcttgaacccgggaggtggaggttgcagtgagctgagattgtgccactgcactctagcctgggtgacagagtgagactctggggggataaaaaagaacagaaacttatttctcacttttctggagtctgggaagttcaagatcaaggtgccagtagatttggtgcttggtgagggctcatgccctgactcatagagagcatcttcttgctctgtcctcacagggtggaaggagcaaggtagctctctggggcttctttaataagggcactaatttgatttatgagggcctcactcatctcttgataccatcagataccatcaccttgggagttaggatttcaacgtatgaatttgaggaggatgcaaacattccgaccaaagtcccactgtgttatttaacctaacgacaaggtcagctttgcctaagagttgtactcatgtagtaggagaagtctaggatcagggactggccagggtttggaatagatacacatgatataattattctattgtgaattcattcccttttttctactcacctattcttggtgcctcaccctccctgctttcctgaattacatgatcctatgaagctcctcttcaactgtatctttaagtccagagaagagagtgctggtgagcaccatttcacccttaccaggaaaaattactcctatatgaccaaacatccagggtttcattctgggtagcctgtggaaaatgtgaaaagttcaagctgtgagaacaaatagcccaggcagagccaggggctggcagctctcattgccgaatcaggatttttggataccagctggatatttcccaacctgtatttttttcaataaggggtgctgaagaaatgctcagcaatttctcagctgcacaacaatatgttcctgaactaagaaaccactatgtaattttgtttaaaagcccaggtctcttgtaactgtactttgaagctctcattggaggataagaaggaactgccccttagaaaagacacagttttgttagcctggattgctataaaatggagatgagccaatgggatagaagataaggggcacagagcaagaaaagacataccattacccaggaggaaatcaggggaaataggaggacaagactgagagggtgttcattttgtgttttcggactcatctagctaaaggtagagagaaaatgcaggacttgatatctcagaacagcaggtgaaacacagcttaaaatgggagacatttaaaatggcttctccctggaaaggaaggagaaatcagaagacgctcaaaattgacacgggagggtgtgtgcaatgcccaggtcaaaccaagacctgtggtgtcctgtaggtcagagaaagagcatatcttctatatgtctgaagtaaagcttaatcagatatgagttcaaatggcaataattttaacttgcagcttagacatactgtttgagccttattctgttctgcatatattattatcagagtagaagttagagagcaaactaaatgtgatattaatttaacatttatatgtttatagaacacatagtgatccaatttcatactacgtatacttctccctgatatctgtatctgagtaccattcaccttctggaccactgagcttatctcacctccgtagataggtttatgtgtagctcaatgacatttttggattatgcactctgtgactgagtgatacactttcacaagcaagaaatccaaaagccttgaaaaatggaaagtatgtatgtgtgtgtatgtctgtgtgggcatgtgcatttgtgtttgtatagctcatttgacaacaaaacctgacctgaactgacatgaggccgtttagagcctttattctacactatgtgactcttcatatgttttgctttagaaatattaacatatttgattttagggagcttccctaggctctggcagaaaccccaaggatttcagacaaggcaagtatagacataggttgattttctgtaaagtctaggagacaattttaggaagaaaagtattacaaatatctgcaatttaaatatttaaaaatatttattgtaaatacaaacttgtaaaggcattatataaaaataagtaatgaacacaaatctttgtacccacttggttcaaaatctccattaccatctttggtttgatttttttctctcttcctttttttgtcctgttctttttctaggatgaatcctccatgttcttccagtttggcccatcaattgaacagcaagcttccgtaatgctcaacatcatggaagaatatgactggtacatcttttctatcgtcaccacctatttccctggctaccaggactttgtaaacaagatccgcagcaccattgagaatagctttgtgggctgggagctagaggaggtcctcctactggacatgtccctggacgatggagattctaagatccagaatcagctcaagaaacttcaaagccccatcattcttctttactgtaccaaggaagaagccacctacatctttgaagtggccaactcagtagggctgactggctatggctacacgtggatcgtgcccagtctggtggcaggggatacagacacagtgcctgcggagttccccactgggctcatctctgtatcatatgatgaatgggactatggcctccccgccagagtgagagatggaattgccataatcaccactgctgcttctgacatgctgtctgagcacagcttcatccctgagcccaaaagcagttgttacaacacccacgagaagagaatctaccagtccaatatgctaaataggtgagtgtggaacagagggcacattgatggtggagatgagaggggagcttcaaagactggggttggaagttcagaaactgcaggaagaacagttcaagacggtagcaggttgaagcctggccttgggcatggcaattggtcatgattgggggagtgttttggatccaaccttgccaaaacaactttcatttattgagcacttattatgtgttagatgttactctaagggttttgcatgtttggtttcatttgatcctcaaaataactctataagtcaggttttaacaattgtttctattttacaatacgaaagaataggcttggaggtgtaaattatacaatgtcatgttgcaagtgagtggtcagtttggagttgaacctaggcctctctgatctgtaagtactacttgatcgcaaagaaagatgcaggagacttagaaataagggaggaccagtccgcttacctttggaatgttgccgtattgtagtaagattgaagaacaggttatgcggatctgtagtcgtatgaaggatattctttctttaaagaaacaggcttggtttttgtctcttcctcctccagcctctgcctttaagggtgaggatgctgctatagaggtggcttttacagttactcttagtctggtttgtttggcaagccctcatcttgcataacccagccgtgactgcagtgcatcctccgtggggtattaaatgactctgtggggtagaagattctatactatactttcgtggttttattatttgtataaaacttctatgtaagtacattataaaaattcaaactaaatagaacataaagaagtgtgttttagaaataaaagtgatcttaaatccaactaattggagataatcattgtagaaataattcgtgaacatctttctagatatctctctatgcatgtacatttatatggacataaatacacaatgttacatatatggaaatataagtatacttgctgttcaatagcttgatttctttcattcaacaatgtgttggacatccctttgaaattatttttaattgtattaagatgtacagaaaggtattcagaaaaacttaatgcatactcaggtactcactatctagcttaataaataaaatattaaaaggtgtacttgggatgttaaaaaacatatagtggaggttgagtgggtaacttctagcagggagctggactgcagtctgtagagtacagcttcaattcagggttgaaactcaaaccaggttcacagtagttatatctgtgatccaatcttgatattcttccaccatcaactctctagaggttcctctttccatcatccctaggtattgccccttgcttggcacagattgtcttggtttttcttctacctctctggtttccttctattccagttccatctggggctccttagcacactcctgttttatgcatcccttaaatatgggcacttcttggggttctagaccctcttcctttctcatccattcccaaggatacaattaatgtctgtatattttccaaagtgacatctctggttgcaacctctcccttgagctctaaatttgtattcttagctgtggccagatatgtttctttggattccatgggcacttcgaactcacagtatccaaagctcaacttctatctcttctcccactagtctcccaccctctcctagccaaatctgcactgcctgtcaatgatgtattctattacaaagttacctaaaataaaaatttcctagatgcccttggttccacatccctgacacctcatagtcaatcgtactgtttgccccggattttagtctccccatacctctggaatgccgttcttgttttcatctctcctacaacatcccagtccattttttctcacatgcattactacagggcttcttacatgatcttcctcctccaagttctgctgcttttcaatttacattgcagccagggtgatcaaaattaaaaatgtgatttcatcattctcttgcttaatacctttcagaggcttttcattgctcctttaatgaggtccattctccttaatatggtttataaagacttcagcctcatgggccctgcctgtctttccaaaattctctcatgcttttctctgccttgcacgctaccttcctgcaacactgagcttagttcttcaaaaacaccatgctctctcttgcttccagctctttcctctctctgtcttaaacttactctccagcgtgccccttcccaccaaacacaggtgctgatgttcccttacctgcctcatgctcttcatttgtcagattcctcaggcttcagtcttggcattacttctgctgggaagtctttcctgagcttcagaataagattactgtattatttgccttcactacatcttgtacttttcagataaagccactcttcaaactgtggcaattgcatgctgtattatctcccttccctgtgagctctgtgagagtagtgaccctcccatagcactcatttctctgaccccatttcctgcacagtgcatggcacacggaagtgaatgacgccctccaagactcagtgcacacctgctctgcaggagccttcccgttctgctctgttcttgcaagataataaagattcccttgaaaaatgtactgttgattcagttctgtagctttggttttcctcccactgcttttcgtgttaaattcaaatctgattcagattattttcccaaatgtttgctaattacaaccaaagctaacagtgaaggactactgagactaaaacatctgcccaacaacacgaagaaatcaagtgaatgttaccttaaagctcataaatatggcccaggaatgcctacttttaacttaaaacttctgctgggtaaacaatgatctgcagatattattatttcctgcttggcttatgttacattacaatgtaaatgtcatctctgaagcctggtttctaaccacatatctctgaaatcgcaattggttttaacctttgttgccatctctctgaggcctgagatgctcccgtgtggccacccaggaaggtggccctactcagtcctagaggcccacatccgtcttttccagtgtagcagtcctacagggaataaggattattattcatcaattcctcaggcaccagtgtagagcagagagactgagagagagagggagtccagcttcacttgatttcccaaatgtacggcttaagaagtgtcttcagatttacctacctacttctccactaaagcatttcctctgcaaactgccccagttccctgcctttacttgggttctgcacctgcctgcccgctggacatctcttggatgtctcccttgtccatacacctccattcttcccttatctccattgtctttcttttccttcctctccatccaaatacatcttcttctggttcttgaatgtaatccctgcctgtcttgagaatattttagtatagtttcctatcaggatccagaaaggattggggttgactaacagggtttatagagttagccccaagtctgcagttttatcaccaggcacagcacgctcaaaagcagcagtggaatcaattaggcacattcagttcaagctcctcctacttaccctgctctgaaatcagactctccaccccttcagagctctggtctcactagggtcactcttttaaataacaaaccaagcagccacaccatttagccacagcaggaaatctttgcaaataaaattgctgcaaatggctggttgttttataaggatgacttttcctttggcctgctattctcctctcagcaactgcagtagggaggaaggctctctgggagatttctgggagtggcccagccccagcatgacactagggatgtagggttaggaaagtggcttctcctctcaccttctgaaaaggcagtagcattcataggcccctttccctgctagaagcattgtagggggaggtacaggtctcatgcacacctatccagattacagctttctttccacgtggggaaagttcctaagtctacacttaggggatggagagaagaggttatatgatatacctgaatcccaaagagagacatgtatttgaagtgattcacttgttagttaccaaaggaagaatatatttttatggcataaaatccttctcagggaggatccttaaatgcactatttcaattcactatcaaatgaacattacttatcaggtgttaatccaaattcctcactgataacttcttaactccttgaagcttggcctgttatagacttagtgattatctccagatagattctgggttgcctggaggaggcattttgccagggttgcaagaaaaatacttaagccaagttaaatttgaatttcagataaacaatgaataatttcgttagcacaagtcaatactaaatattgcatgggacatatttataccaaatgaatatttgttatttatctgaaattcagatttcatggggctcttgtagttttatttgctaaatctggcaaccctactttgaatacatataaaaattaattttctgttggaacttcatagcattcatttgtgccttattaataaatatagtacaatgccctatactatagcccaagacatgctaagagagttttattccaactgataactttatttgattgaaagggctggagaatttcttatgctatatattctctaagggaagaattttcttggttcctgagaaaagtctaaaaacgttttggtaccagatgatctgaaaatgtttagaaaatgattaggtaagttttccaaacccatcttcattcccctgagctgggaagaaattgtgagttattaggaggcacccgtctacatttttcatttgtcatttctccaaggagcagttagtggttattttccttctccatgtactctgtaatctctgatggtctgtttctgtcactcacgtgatggtacacctgccacatacctctgtgctctctttctgtcctgagagcccgctgcttctcttcatacagagctacttttggaacttgtagaaagaacggatgctatttgagatagatggatcttaatatagcaaacctcttatgaatcttgcctaattacttttccccagtgtctttagtttttctactcaacatttgtttcctccttccctaaattcttctttcttagtgaaagttgccatcttaaaaggctggatcgtcctggcccagcctttgagggatggggaagagtgactttgaataactgatgtgaaaaaaagtactttcttaggttcttaatgaaagagctgtgataagctcaatcttcctacaaccttgaggcaaattccccatctttggaaccaatgtatgagccagattgttctcatgggatcctcatttgactcttggcctggaaagtgctgaaaggttaaaaaaataaatgaggaattgagtcaattagtttttaggcattatgggcaagagctgcttggtcattacccatcttttatttgttattaaatgttcgatgagtgccagcacaggcagatttatggtaaggcaaacgcatgttataggttcacttcacttaatctaatttacagtgaaacaaccaaaaggttacatgaatgcatagtaataagcggtatagctggcacagtggcttttcatcttattaaagaagtgcaccagagtctaaggaaagctacatttttatgtatatgcacaaaaatgcacattttaatgcaaaatgtttagtaaaatgacacacacctgtatatagagggagggaatgactttatctgctcagtagtgtaaaaggatatataagttgggaaaaataatcgaagaacctaataacctaaaagatacattcaatgcttattgtagttcaggcataacaatgcatgtgttagctgtgtacagaacaatcattgaatgggaggacgattcaaactcttctgttttcctctagtctttcacattcctcatatcagacatatagatggtcatttcagtaaatgattgttgcttcttctccctgaagtcaaacttgtgaaaggcattttcaagtatttttaacactgagaccccctacagtattctttccttaatcactaattctgcggctgacttctaagatttaaaactcacccataatataggtggtgtttctcttctttgtctcttttttgttattcttcctctttctcctcccttttatttttctcttcgccttcctcctttttgcatttcgataaagttcaaaatggattcctatagtccattctgcattgctctaaaggaatactaaaggccgggtaatttataaagaagtttatttggctcacagttttgcaggctgtacaagaggcacggtgccagcatctgcttctggtcagggcctcaggaaacttccactcatggtggaaggtggaggggggccggcatgtcacatggtgagagagaaagcaggagagtgaggggaggaagtgccagtctcttcaaataaccagctctcacatgaattaatagagtgagaactcactcatgaccatgggcagggcattaagccattcatgagagatccatgtctgtgacacaaacacctcccactggctcaatctccagcattggggtcacatttcaacatgggatttgggggggacaaacatccaaactgtatcactcctttaaaaaattagtgtgatttggaggagagggcaggggatacagagggtgagtgagtggggaaagagttacatttaactgaggacagtgagtggggtggagaatgcacatctgtgcaggggaagaagatacagacggaatatggtctatgggaaggaataggatggtcttgaaggcagaagcaaacccgagaaggttaatggctctcagtggagaaagcagacaagcctcattctgaaaacagattctgcctcagaaaggacgtgggttggtgacaatggcatgggttaaaaagcgggtcataggtatatatttaaatcagccccagttgtcagccaggctgcgaaagttatgaactccatcgttagttgcctttttgagtacttactgcatccccagcgctgtgcagttacctaatttgatccctgcaaaaatcctgatgcaaatgtcctcgagagacattccctgatcactctgtttaaaagggcaacttgtattccccaccctcccaagcactctctgtccctttctcctgctttattttttgacatagcacatatctgatatactgtataaattatatttaaaaaattttttttgtctccctcctcccagcagaattcatgctcaatgagagcaaggtgttttttttaacctttgtattctcagcacagtgcctgataagtaggcaattgataaatatttgtcagattaaaaagcaggaatgaaaagacaggaatcattattctcattttatatgtttttaaggaacccgaggcccagggatccccagctcaggctgtgtgatgccagactgacctgatctgccttaggggtcctggatttcagcccctcactgtgcagcacattaaggaagctttaaagaaagctcagctttccttagcatcaaagcattagagctggaagagtctttagtgctcatctaatccaaccctttcaatgcatgtcttcttaatgaatagatggtaggatggaatttacatatgtgaaaacacagtctcagagcggtcactcctctgttggaggctgggcaggcacagaagccaggtgtcctgatggcaggagcggtgctctttgctagagcatgctacctctccactgcttggccatgtcctcagaagggcaggctggcaggcagccagggctttgctgttaacctttgccctggcctgccagcgtccccaaggctcttgctcccttggttcttacctagacaaggatgcaaattcacagttaatgggaattgaagctggtattatttaggaattgagtgggagtcgtttctccatctgctctctcttcccaccagaggataaaggctgcctgggtgggggtaaggatggggatgagttgccagaaagctggagtgctgtcatttctggttacagacatggactggaagcctgagtgagggctggaccacagctgtgcaaggtcaacttaactaacatgagcttcccgagagcagagatggttgtgtggcttttatatctacatgagatcttgcacaatttaaatagataatggtttgagtctttctcttcgtttcctctcaaatggtgctgtcagggatgcataggtggtcatgtcctggagaaaattctccaggatctgatgtggccgataaggatttggaagaagcagggcatttaggatgactactgagggatctgaacagcactgtagatagggcacgggagaagccaaggaagatatgtggcaggagctagcaagagaaccttccctcggctttcagaaatttttggtggcgcgtcctcttccgggaggacatggtggggttagctcgcccagactggcaccagtctccaagctgagctggctggtcacacatgaaggaactgctgctgacagattagggcttcccgctgctgaaatctgttccctcttgtccagcttccagcagcagcagccggccgggggctgcctacagcttccctcaatgcccaggccttttctttccctcattcattactgctccacaccccaccctctttctttctttattcttttctgtctctttctttattgggtgttttgttcattgatcttttgctgcccctctcttctttagccagctttcatttaaagcttttaaaacctttcttgcctttacctttctatgttcataaatgaccgcctgtggaattcttgcacgcacacactcatattcatgtgtgcatgtattcctcatccagacagcacctatttatgtatatttgcatttgtcaagtgaagagagaattaagaaaactggataaaacacttttatatgttacatttctctaatgctttctattgctgagactatttagatgattacatgagaaaggttgaatatgggatagaagttgggaggaattcttaaaaaatggcttgcctggaattagctctgatgaatatcaagtaaatatttccttccaatctgattccattgttaaagtcttgacggctgtaaggatggtcgctaaatatccctagcacatttattgtttgggcgaaggagggaaacttagtagtcaagtggttttataaattgttgatgagcctataaatgaatcttctttttctaaagttaagttctcccctgacaagcaacaggaatagccatggaaaccaccctgtgacaatatggtattcattgtaagtggtccttttcacaattttccaaaagagattatagatggggtccagatggaggtaggtgtcaaaatacatttagtgttagacaaaaaacccaattatcaaaaatttcgttgttcatcatcatggctaataatgatgatgattaaagtgaggattttcatacagataatcttcttgtatatcgtctcactaaatcattataacaaacatgtgaaggcttcttttattcactgcaaggattggctgcggacttcaacagagaaacctcacatacttgcttcctttttgttttctcagaggtatttccagacactcccattgactttcttcctcccctgcttgaaaaaaaatctttcaggcacttttgtttaggcaaaacagcacaatagagcattattatattacagttcactattacacagatcttaataatgtgtcaaatttccctcattattgactatagaggacaaggtgtgtgtgtgtatgtgtgtgcatattagagactatgactcaaaatagtggactccacaggctgcacggggtcattgtcctcacttctgtcacacgtgctcacatgtgttcacatggagacttggcttttttacctaaaggacaagaggtcacatattcaacaacctgatgtatctagaacataaccaacagtcatgaagaaagcagaaaagggctctgagctaaaatccctgacacaaaactcttgccctaaaatgactgctgtttcttgtcatacagagtgtcgctcaaagcacgtttactctaattttacacatacttctaagaagcttgtgggcagttgggttatctatggtgtggagtcccagtaacccagtttaaatgagatatgtgagcatagttaggtggtctgtccagagctgggatgacagctgcatgtcatcaggactcagatgcctgctagctttccactctttcatccactgggtatatccttcatccccatgcctaagatggctgctggaactccagtttcaagcagcagattgaagttagaaaggaaggaaggtaaatcatttccctgtttaggaaattcccctgaagttccacactttgcttatagtctgctggttggaaatcagtcaatggccacactagcaacaagcaaaattgggaaatatagcttagtttagtttttaacctgggcagtaatgtgcccagttaaaaatcaaagttctaagccgggcacagtggctcatgcctataatcccagcactttgggaggccgaggcaggcagattaccggaggtcagggggttgagaccagcctggccaacatggtgaaactccatctctactaaaaatacaaaaattaaccaggtgtggtggtgtacatctgtaatcctagctacttgagaggctggggtaagagaatcacttgaacctgggaggtggaggtttcagtgagccgagatcatgccactgtactccagcctcggcaacagggcgagactctgtctcaaaaacaaaaaaacaaagttctgttaactagtgagagagggccaaggccatatctttggtagacaactttgagatatttgtttatatgatttcctagataacaatagcttaggtataacagacatgatgatgaggatcagataggcaaaccaacagcattaataaataacagaatggaaaagagtggaagatattagaaaaacccagcagaaaaccttgaaaagcagagttgtataacaccatttggggagaaatgtcatctacgccccagaaagcatataccctgcataaaaatccctgtatagcaaaaaagcatagtcattgttaagtcatcaataagagcttaaattatatcgattatcttaggtataaaaagtcagagaactctgtaatgcctttctgaaattttccattaaaatgcttcctataatcaagaaaaagcctgtactttaaaatactaagcttcagcaatttagaaaatttatttttaaaaaagattattgagtgaatactatgtgccaagggctttatatagcataatttaagcttaaaagtattgtacagggatatgattgcctccaatttttagataaactgagattgcctgagtgaggtggctcacacctgtaatttcagcactttgggaggctgaggcaggtagatcacttgagaccagcttgggcaacatggcaaaaaccccgtctttataaaatacagaaatattaaattagccaggcatggtggcatgcacctgtagtcccagcaacctgggaagcttaggtgagaatcacttgggcccaggaagatagaggctgcagtgagccatgatcatgccactgcactccagcctgggtgaaagagcaagaccctgtctcaaaaaaataaaacgaaagcaacaacaaaaaaccccaaaccccctgagatccagaaagattaagacttttgcttactttgtgtttcaaactcaaatttttatgaattccaggcgtactttgccccaggttatccatctttctatgtcctttgctaaagaggttgagtgaattaggaatgactcacatgtatataaacatatcattaacctgtgggacagggtggtttggtaataaagagtttcctgtctgggcgcggtggctcacgcctgtaatcccagcactttggaaggccaaggtgggtggatcatgaggtcaggagttcaagaacagcctgggcaagatagtgaaaccctgtctctactaaaaatacaaaaaaattagccgggcgtggtggcggatgcctgtaatcccagctacttgggaggctgaggcagagaattgcttgaacccgggaggtggaggttgcagtgagctgagatcacaccactgcactcacagagtgagactccatcgcaataaaataaaataaaataaataaatagtttactttcttggattctctgctatttcttgccctaaagactagaccatgacacatctagaatcagcctgggagtggcatccaggacacacatggtaaagacttcccacactgaacctgctcatctcactctctgtcctgaagtgtgcccatctctacttgctggtcttgctctgatcttgctgatacctcccttttcctaatgggaaggaggattattttttcttatcctattcccaaatcctttaacccatagaggaaaaaacaacaacttgtagtctttgcatacctgaaaaatccttggaactgaagcgggtggagactttctggtctacaacctgccaaggttcagggagattacagatgcattgaaaatactgtcagggacatgcaatagaacaaaacaagaccttggcctctgccatgatttacaaatgtcctccagtaccactattcatttttgacaggtcagataaatttggatttgtttaagccttgtattcagctggagattggagaaaagttaaaaaaaaaaaaaaagaaaatgctattagaaatgaaagaaacgggacatgtggggcccacttttctgcacttcacaaaattacattcattcttaattcactgagtgacacatccagtaggaatgtggaccccctattctgtatgtactgaaccctgtgccggatgccgggaatacggacaatacatagcattcatctgattgtcttcacaaggagtggagtgtccacagatgcttttagtttgctgtttagacttatttttcttgaaatataaagtgaattgcctaaaagactagcagaatgagcttcaggaacgaagaatttcagaatgttagtgaaaaccatcacgaatttcctggtacctctgatccaaggccatggaggatcctttctgatagagactaagagagtggagttcaggagaaaggaaccattccaatatagctgattctagtttgattctctaatctcattgtctcagtttattggccacctgcaaactcaaaacttcatgaaagaatattctttaggaatagaccagagtccccttcccccacgtgcatacacccacactttgtgggctcactcactaagtttaaaaataggaaccatggtgttgccatgacgcccggtgctactcagcagcgttccttttccctttgatgtgattcctcttcatagcatgatttagtgagaatctggctcagagcggcctctagtggctcaatccttagggatgcgcttccttccccagcccagttccaaattcagcccagttccaaaattaaccaccttagccaagttggacacttgtgtgtttagaaccattctccatgcaatcagctattttttttcagaatctttctcatcagccacaagtattacaccggggagtacctactgagtgctcagaagtgtgcggaacagcccaggtattcaccatctctctggccaggagagaccagcattaccccaaacatttggtgaacagtagagagcagtggcagggaagctatgtggtagaggcagtaatgttgaataaagtaatcccagtaaaataggttggttaggatcatcagaagttagctttttttttccttttcttcttttttttttttttttttttttttttttgagacggagtttcactcttgttgcccaggctggagtgcaatggtgcaatctcagctcaccacaacctccgcctcctaggttcagcgattctcctgcctcagcctcccaagtagctgggtagcatgcaccaccatgcccgactaattttgtatttttagtagagacagggtttttccatgttggttaggctggtctcgaactcctgacctcaggtgatctgcctgtcttggcctcccaaagtgctgggattacaggcgtgagccaccacacctagccacatttttctttttcagatacaagagtcttctaaagtgtatcaactgatactgactcaacagcctcagggatgtattgatgtgctgacttcctcccgtgctgtcttcaccatgttttcatttttctgtgttttgagttccttgtgtcagtgcttctcagtcatgactgcatgttaaaatttcctgagaagctttaagaaactgtatacagaccccaaggccccacccagcacacattctgatgtagctgcactggaagagggtaagggcccgggaacagacgtgtattaaaagcatccaggttgattcctaagggcagccaggagttgtaaatcactgttctccagtctcctgtcattttttttttacctcggttatcagaatagggtaaaatgcaatgatagcattcacatgcatttgaacttggtgctcttgaaagaattccttcctttcattctttcctgactagtctgaaaattgtgatttccactggtgctatgaacttcaaaatttggaaagggtacaggatatgaacatttcatcatggtgatcctcttgcaggtggtcatgatttcctaatttggtttctgttcctgttgctggtacttcatgagtctattttatgcagagggatgagttttcatcagtaaaactggcaacatgagcatcaaaacaaatttgactttaaacagcatttcaattcctctgtacatagattataaacccaaaagaaacagaactttgaagtttcaaatttgatgtgtcggctggccttgatgagaaattgatgctttgctaaattttggagtacacaagtggttttaaaaatgaaagttattagcactagaaagtgatgttctttgtattactacactgttattatatttaatgaaatggctttctgaagtactgcagataaaaggaaaagcagtgtttagaataagacacacagggtaagtgccaaggtaagaaaagaaatggtgggttgtctttatcttacagtgtttctcctggaggctgggagagtcctccttcaggggaaccagttgagatggaaagggtttgtaggtggatgtgtaatgtgtggcatttttgtggttctgaccgagcccaatcttggcaatgtctactgtggacaagcaaggccaaggtatagctttgaaactgtattaagaaagaacataatttttcagaattatgggtagggtaatgtaatctatctgattaaacacttggaaactttacgtttgtctaaaggaataagaagaagaggagaaagaaatgcttattactattgttaaagtgctttatgatttctgagaaaagaaccatggcagaacctccaggtacacttaacaagtaggagattattaggtaatttttatcattggcttcaatccctttcttccactcatccacctatctctctagcatttatcacaaaggtgcctggatgaacagacaccattttgtatcacgtccttaaggtcatcggacttgagttttgtggaatgagcaggaagaaatcaatctagagtgcctgttcgccaaacttcagatttcacatttaagatattatatgaactttcagccggacacagtggttcaagcctgtaatcccagcattttgggaggctgaggcaggcagatcacaaggtcaggagattgaggccatcctggctaacacagtgaaaccctgtctctactaaaaatacaaaaaattagccaggggtggtgtcaggtgcctgtagtcccagctactcaggaggctgaggcaggagaatggtgtgaacctgggaggtggagcttgcagtgagccgagatagcgccactgcactccagcctgggcaatagagagagactccatctcaaaaaaaagaaaaaaaaaagatattatatgagctttctggagtctcttccccataagtgtaatatgagggaagaactaataactattaagaagcatttattaattgccacataatgcatgttcctcttttgggcttgacaaggaatttattatattgtatgttgcatgttctttttcttcttcttttttttttttttttgagatggagtttctctcttgttgcccaagctggagtgcaatggtgcaatctctgctcattgtaacctctgcctcccaggtccaagctattctcctgcctcagcctcccaagtagctgggattataggcgctacaggcacgcaccaccacgcccggctaattttttgcatttttagtagaaatggggtttcaccatgttagccaggatggtcttgaactcctgacctcaggtgatccacccgccttggcctcccaaagtgctgggattacaggcatgattggcccggccatatattgcatgttctaatattgacctggcttctcaaggtttgattgcaaatatcttacgtaggcagctaaatccttgttttccatatgaacaatgactgatagtgtaagtgagattatgtgtttagctggctttttttttatttgaaagtaaatagacgtttttctggatttcatatcaccgacacacaaagcaatactgagttctgcatttgaggttaaggatgggtgaaatgagatgtagctactacattgcatcctcaaacaatttaagacctggacattttagtgggcaagagtctgtgtccattattaatgttccttgcacttgacaggggtttcctttccttggttgtcattgtttccatcttgcctgaagtgatgtcaacctcatttcatcctggctatttggtgttgtcttgagaaccagaaagggagaggaagaggcaccatagttaatctgcccagagtgcctgactgcactggctgccatactttaagggtgacctagaaatgccatatgctgtcctggaggagcagaggagctgagggtacatccaggagttcagtggccacctgtttattcccgccaacccccccccccccccgcttttctatgggagatgatagttcatgtttctcagtgtcaaggaaactgagaaatgtttctttttctatttctattgcaaaggtaaaagtgagaagtgggaaaagcaagcaagcccagcattcaattcagccttggaaatcttctgaatcccgtgtaaaggacacacatgctatgtctgtcagccctggcagtgacacgtgcttcagattgaggttatttttttccaaaaaaaaaaatcctgtcttccattccttccgaaccctgggaaaggatcctacttctccacactcggttgtcccagctgtcgtatcagtcattctggttattggtaagcagcagggaaatatgtctataagaaattgacaggagacataaaggaacaggatatatctgatgagaaggagggatttcagaaataaataagattagggcgtgatcctgtaatgcccaggtgcttagtcccctgagcagagccctgttgggccagcatgcattgcattggcccattctgatactattgagattctgctgaaaaagcagcagcatcatgacaggagagcagtctgccttaacatagcagcattatgccatgagacaatgaaaaccctgcttttatgaatttaattcagggaaaaggaggttgactccttgtaggagtatatgcttaaaatttctcaaatacagtatgctttccttcacaaaggaatgagacccaaggcttgaccagacatcaatttcaaaggcatgacaaagaccccaacaagcatcttccaggaagctgatgtctagtcatcgcattggatgataaaaaacctatcaccttcatgtctgcacttttttagatggaaacattatcattgaagacttcaaagtgtctatagtagtctttctcaaatcaagttgggtatgagaaagaagttgtaaccatgttttattggctcaaataagatttctgtgtgctgcaaataataaagaattggatatctagagcagaaacctaatttcctcacaaatctctgatgacttattttatccactggatgtggtccacatttcttggcaagccataaaagacctttgaatatccggccttaaccttcataattgggcttatcttatttaactaccctctcctccaactccccaccttatgccaacatacactgcttgtgatctcacaacatcaaataacattactggccactctcttagtatggcagtcttttaccccttcatgcatttgcataggctgttccttgtgatgctcctctctttcaatttccctggaaggacataggtgtcctttaagatctgactcaagtgttgcctcctctctgaagccttctctgacgattccaggcagaattagtcattcctctctttgtgctcccatagccctttgttcatacctatggcatagcacatagatgtgcaaacagttcacattaaaaattcattatggtatccaccctaggattcatggcacagtagacacaaacattttctattgaatgaaaatgtgaatgaatccataaagaaataaaaggtggggtttgtgcacgtggagtacaaaacctgattattatttttaaagattaaatatgccatcttcatgtgtgaaaatgactctttggattcattggcagaagcagttaggctttgaactagttttcagcatttgctatgtgcacataaagcgttcccatggtctcgggctttataatcagtaacgtacttggaagggattcctcactgctctttattccttttatatctgcatcagtcagacgcccatcaccctgcacagtgcccctaagttaagtcatcctttcttgccacctgcagagtcactatcctcattagcttgtgcctagatttctataacaagctgctctatttcccatatcttgaatatcacaaaatcatctactatgaattttgtatttttcaagtatcatttcggtcattttactcatgtgattaagtacctatgggggcttcatttagcaaattgaaacttagaatggaaattatcatccctagatatcatcaacttgatctcaaattactttccgaaaggaactgttctctaggcagacccttctcttttccctccagactgtatggtatagtggcaagaagcaagagagcatggttcttttcccagctttgtcactaatttgctgtgttaccttaggcaggcaagtcattttaccttttcagactttgattggttttcttctctgtaaaataatgtcttacaagagatgcttacttggaaagaaagaatttagaagacgtgagccctacgttccttctgattccaaagttttttgattttttgattatatgaggtattgaacttctatgtttctttccaaccctgtgatcaatgaagaggcttgaagagattttaatccagaacgctggcctcatttataccacaatattatacagcagccaacaatgtctcagagggggagtgaagattaagagcctctacgcaagcctacctcttgcatggatgtatacaacaccaggagccatcctcttttagattggttttaggttttcatttagccaagcttttgattcacttgataaagagaaataaataggccagattttattttctttgattgaaaagatttattttatattctccttgcctcagtgaaccctaacctacccagttagtttaattacccaattctgggctgtctgagtccttgattctgctttcctcttctcaggcctacttggtagagcttttacttttggggaagtatagggtgtttatgacaatgaatagggtaaaggtcaaaaaaaaaaaaaaacttgaaaccattttgggtcaacttcttttacctaataggttctgctaatggaattgttcagcatgcccaaggttgagttttcctgatatacccccataaaccttgtcctccactggttttctccaactcaggggaatggcatggttatccttcctgttgcacgtaccagaaattcacaagttattttttattctttcctggccctcactcctttcctttaatcatgtatcccaaatctgttcacttcttttcatgttctctagagtcctggttaaacttttaatatatgtgtgtgttcctctaactagactgttagctccacgttggcagggatgtgtctgtttcactcaccattgcagtttaatgcttagcactttaatgagctcagtgcaggcactcattatatacttgtcaaatgagtgaattaacttaagctaattgtgaaattaagcttgatttgtctatggacttgattttctctgggctcttggattacctattgaagattttgtttcagattctatttttagattctttatattttcaacaaacggtaaagtacctactttgcaaagagctatactcactgtgaaggataacacaatagaaaagacatgatccagctcacttaagaagttgagtttagtcaagaagtgaagtccccatacacaaaaatgttgagtaaacatgaaataatatgattacatgtctcacattggtatagtacaattcaaatgctatagtagagggatattgtctaggtcggctgaagttacagccttgatacatcttggaggggttggagtgacacttgacctggatttcaaagaacgtagaatacagaggcccgagggaaggaggagtttcttcaaatgggaataatagcatgaacaaagatttggacttgacactgaatgtttatgtgagggttatattggaatcaacttgacctgaatggaattgtgaacaagtcatgggagataaatgtggtgtttacaagtggaacagagttgttcttttgaaaggcaacaagctatcatcagaaaggtaccatattgggagttggcatggaaatatgtgatcttaattaagtcatttattttctccagctctgttttctcatccaaaaaaaaaaaaagtgtggtaatgaacatgcaatagtaaagggttgcattacattaaattttagctcttatatgctctcattctgtaaatgagttcaactaggcaccattagtgtatttttgttttaaatcctttctctatgaaacagcctagttagttcttgaatctctacccatggctgaatgagtgttactattaaccaataggtcatggagaaccctgaaaggtagattaatgtcatttaactttactctggaaggtaatcataaaaaacacttgatgaaatggttatgataaatggttattttaagaaaattaatctcattattactatatgagagaatggggaaagagtaaatcaagatggggaggcaagtcaggcctttttcaaattccccagatgtgaggtgatgagggccagaattttggtggccattgggattgcaagataattttgaaggacacttctttaggatccagtaatgtcctctgtagagctaatacaggggacaaaatggtcaaagctgggcttttggtttcttttgttttttgcttgtttgtttgtttgtttgagatggagtctcactctgtcaccaaggctggagtgcagtggtgcaatctcggctcactgcaagctccacctcccgagttcatgccattctcctgcctcagcctcccaagtagctgggactacaggtgcccaccaccacgcccagctaattttttttgtatttttagtggacacggggtttcaccgtgttagccatgatggtcttgatctcctgaccttatgatccacccgtctcagcctcccaaagtgctgggattacaggtgtgatggcttttggattttaagattgaagggatgatgatagattggtggaaactgagaagttggagtgggaacttgcttttcacagaagctgcatcaaattctgaactgagggctggacacattagtgaggatgtcttgtagtgcctacagctatgcagtctggaacgtggaattacagatttaaaatttatcagcatagagtggatacaactgtcagtggcccagctgagaaaagctgagttgtctcaggagaagagtatctagaaaaaagtgagctatggactgagccttgaacatcagctatagttccagggcaggaggagccacagtgttcagtgaaggacacaggcctggtggagacagggaaggaggattgtggtggtcagctgtataggtgcacgtgttattaaagccaaaagaaataaccattttaagaaaggaaaggggtttagtcatgtcaaatgtggtagagagggcaggcatttgtgggccaaccttaccttttatttccctttttttgtacacttaactaccattaatcagggattaattatttagttttttaattattctgctcagttgcctaatgtttgatcattttataaacagcataaggaagaaatttgagggaagggaaagattcaaaccattttccccctattacgaggtgtaggaaaaatttggtggggaagaaacttaacactcactatcgcctacaatgagatttggggcccttgacacatgattagatgccaggggtctctcaacatcctggcccgtatacttgttagctgaatgaccatggccaggttcctaacctgtctgggcttgcttcttcatctataaaaacggaggcaacactaaaggctttgtactgtatttgtgctcgttaaataagaatgtatacaaagtgcttagcagggggcctggaacaaagagtaccaaaacacagtcagcttgtttggttattagtatctaattttgcttgttttattgggctatccctgctcatattgacattaattattgataattgaataaaacattgtatttggaaagtgtaatcattaaaaattgtattttctttttctcattttttgaagacgaatggatttcttccattatagttttataagacataaatctatatgaaatctgagcaattccttgttcctgaattttccctgccaagggaccccagcctggggatggcacctttatgaggaacagtgaggaagtggcctggggatgcttcacgataggaggaaggaaattatctgagtctctcagtctgaagtgttttactgatgttggaatggggaatcatcctgaaattaaaaaaaaaaaaaaaaataggtgtatatttctcagagcaaagatacatgtgctgacaatttagattttttgcccagagatgctggcattttgtttctgggggcggttcttatgtttccaacagtgttcccactgcatgccatgttctctcctcctcacccttatcctcccacccccctccccatatggcttcctctttgtctcgcccaccctactcctggtttctttctgtctctctcttctcctgtagttatttcctttcggcagcaaaatgaatccttcacagaacagagtatgactttcctcaaacccattctccatctctttcagctatttcttttctggaagttctcgaatgagcaagatatctgggagacagtctttcctacatattctgttgcacttctccagtgattctctttcctctggtgattcatttggctccattctctgcctccatcttccccaagctttctccctaatgactcttccttccacccgcctccaagactgtctctccatgaacaggctacacccagcccaagacttaacctggccttgaaaatcttcatcatacaaaagctaagacagacagagagctacataaaaacgggagagacagaaggaagataggactctgagaatgagttcggacatgactaaagatgacccaaacagctgggtgcagctgtgggaatggcagtgcattatttgtgataaagagttatgattgatagtgcggtacacaaggacttatctacattaacctcctccccgccactcccatgctgggaataaatgttaagttattgttagcatattttgttttctttgtttaaagcacaggatagctagtgctaagtaagaaaaaaacagaaaaataaaacatccctcttagactttaactctgtctctgacttcatctctttctcagatggagacacaataccgtaagtgagaataccattgtattatgttgtgtgatttgtgtgagaagatacttgtgtatggagagagttttactgatgggtgctgagggaggtaagggtttcttttgaataatttaataaagaacagaaaataagtgaatattagttctgtgtgaagaagagtccagaggaaataaatgagtaagaaagtgattatcaaactggtaggttatttgggcattctgactagagttaaacaacttacaggtgactgttggtaatgctggcaatagcaaattatactccctctgtgcatccatccacccaccaatccttccatccatccatctaattttcactgagcattggctgtgtgtacagtcagtgatagatgctgtgggagatctatcaagtttacacctggttcctgccattaaggaatctttgatattgaagcacacacaaagagggtgtgaattgccatctcccctctttggcctttttctccatcctttctctcttccagtcttaaaaatcgtctctgaagccccaaactacagctctctgtgtatctccttaggtatcagattacctacaaaacaaatttcttatttttaaaacatatataaggaaaatattctgatgtgtagggagttgtgggcatcctttggtggctggatgatgaaatattaaagcactactaaacagtggttctctaaaactggttgaaaaaaatttctagccttcaatattctttttcttctccctaaaagtttattggttcccataccccaaagttagtcctacccaaccacaaccctgggaggactactcagtgcatgaatctgagtcgtgggctgctgaatgaaagcaaagtgattgcaatctgaggaggtcataaaatcgtgcattcattcattattcaaccaccatttcctgagtgccaaccatgttactggctttgtaaatacagaaataaaagaccagggtttctgcccttgaggggcccacaatctccaacaatggaggtggctgggaaaacagccaaaataccacatgtgatcagttttacataagctttactcacaatgctacagtaagagctacagtgaaagggtcaatgatgcatgctatccatgcccaggagaaggggtgcatgcagaggtaggtttccatgactcacagtatctcctttattgacagatttacattttaccccacagagctattatccagagctgttaataagtaggaacatggtttgcataagtaggaacatggtttgcatttcctagcttttactcacagccttccctcttcccagcagtgatcacagcatcaggtcctcccaccttgagaaacaatgaccatctgagtctctatccctgtcaccatttcacaaactctgcagaaataatgggtaaaacattgtgcttttaacaggactaatcatcatcattgttgtaataacgggatttatatatttcttacaatttgcaggtcccctcagctgtaacaactagatttcccagagagttaaagaacaagctgtgtcacatctaatgagggaagagctagcatttggatcacccaatgctaaagccccaaatgaccaggtgtaaatcgttacaatctcaagtgctttttctatacagccttgataaaatgaacatcctttgtgaaattgtaaatcttcagatcaattcaagaactcatgggaaaccaccagaaaacatagactagacatgagaactgttgtctggaaccaaggctgtgttgtatagcaacaaaaacattaaactggaaatcagaagacttgcatggcagtccacaccctaccttgtcgtggcatatgtcacttagtttctttgtgtcttactctccttatttataaaatgaagggaatgggttagacaatccctagggttaagagtgaagaatttggagcctcttacctatattcaaatcctgagctctgccgctttctggttgctctagttctttccatttcttacacaacttgattaaattactagttatttaatcttgttgagcctcagtttcctcatctgaaaaaatggagataataactgttctgtgaaaggattgctccgataactaattagttaatagttttactcaggagtggaaaaccaaacggtatgttcttatttataagtgggagctaagctatgaggatgcaaaggcataagaatgacacaatggacttttgtggacttgcggaaagggtcggaggcgggtgagggataaaagactacacattgggtacagggtacattgctcaggtgatgggtgcaccaaaatctcagaaatcactactaaataacttatttatgtaaccaaataccatgtgttccccaaaaacctattgaaataaaaaagtaaatttaaaaaaatacatgaaattataaaaaagaagaaaaagttaatagaaatagtatgtggcttgagtaaatgttatatatttatatatatatttataatatataaatatatatatatatttctttcttttttttgacagagtctcgctcttttgtccaggctggagtgcagtggcatgatcttggctcactgtaacctccacctcctgagttcaagtgattcttctgcttcagcctctcaagtagctgggattacaggtggccgccaccatgcctggctaatttttgtatttttagtagagacaaggtttcaccatgttggccaggctggtctcaaactcctggcctcaggtgatctgcccgccttggcctcccaaagtgctgggattacaggcatgaaccaatgtgcccgacaatttttttttaattaaaaaaaaatattggccccttcacctctaggctattatgagtctttgaagctttgatatttctggaagtggagaaagaatatacaatttacaaagtagctagtttaaagaaaaatgctgaaatggctaagaggtatgactatttcagcaggaaactcaagaaaggatacagtggaataagaaattagcaatttcatggatgtaggtagaaattcatgggtagaaatctcagtagggaagcagagggaagtgatgtaatgctctggaccttccagaaataaagcagagcaggtgaagatctgcaagaaactccagtctggtgaaatctccaggagagtcattgtgaagttcattttgcagttaaccccatgcgctcacctctctgcccatccctgtgtcctgctctgatttctgggctccttcattctggcagcatcagaacttagggttcagtgaagttggggtttctcttcacaaaaccctgggccctcttccctggaaattgctccatttcttgttaagcagagggaaaatgaaaatattctagctgtctgtattctataatagttttgtgatgcttttccataaattggtataaacaaataaatacaagctataagaaggcagaagtgtaaagagtctgtgtatccgatctgcttggtttccctcattcttgatcaagtcctgtgtcttgctcatgctgtggcccaacctgtaactcctagctgctaatttagctgaagaatcggttgtttaaaacagggaccatatgccttagcttccccagctgtatgactaggagaacaccttgcaaatgtattgtgatgctgaaataaaataaaatgtgtgaactcaccaaatacagtcctgccaccctactgcctgactcctcctcttccctcttacctgcacatcctcctccacccctcctcttcccctttctttcctctcattcttcttttcttccttgtattcaaaatgacacaatctggtgactaattcctgatctgctctttgatttccccagaggaagaactgatccctccaggggacactattatcctgaggctagatagtgacaacggtgtgctgagaaataaagagcagagatttgcccaaagaagagtggtttcaggaggggcttttggtaggcacagagcacaagagtttgcaattgctatacaagcattattgctctgtctcaaggaagttgtttgcctttcactgacatctgaatttactgtttcagatgaagggggaagaaaaggaggagcaaattatctgctggggacctgctatgtcctagacaccatagtagaatgcatctggcaataatttttggaggtagtggtagggccctgtgcagtcccaggattatttagcttgcctagaatttctacttcttagaagcagcctgtcttagcctttgtgcaaggagtttatatgggaaacaatcttagggagcagaaattagggagtaggagagtgaatgtggaagggggtaaagccaatgataggagccatattgagctgaaaccctgtgagtgacaggtgctggatcccacaagggcatcctaggagagccttcagaaatgcatcttaggacagagtcaggtaatcaattttcagtctcacataaaattaatacttccattttaacattcccaccttcttaatcttctgatctctttttcaatattttgccaaagtcttcccatcatttgtcacctcatcccctaggccatcaacccaggagtatattaggaatgcctataggcatctctgcaaggagtttgaatatcatttcacaagaaagtgttgctgtgccaataaattctctatcccattctacctccagtctaacttcctcaaagttcactcctacatgtgcttcctgatttctgcaaacctgtaattggccgggcctttccattgcaattccttcagtatgtaaactatttcctcctagatattcatcccttctagggactgtattttccagctgtagttgtgctatgacctggctctagttattggcctgtagggactacagagagatggggtcacatattgaggacaggagtcagaatgagaggcacctgcttcagatgtgttctttacagtgtttttaaaggcagacttatttcctttggcaagaggggaggagcttttcttgccttctaagaggtttcaggaaaatcctctcttactgtcttcctaagtgtaccacgtgggtctccaggtcccattcttttcctattggaatttcctattagaatttccacaaaggaggaattccaaggttatgcatttagtctctttggtagcattgccactattagtttttttcctctggatcgatctgattttcagcaggatttcctgagttgatagtcagttcatttgattcttccagtttatttttttaagacttgaaaatgtattgacaaagccagccaactgctcatgtatttttcaaataccagagccaccacataacccaatacgttaccctctaccactagcttatcccaatccaccacaggtaagagtgttagtatttgtgatgctaaagaatgaacatactaggaattaatactacttcactcacctgtagcagtggggtcttcactgaattccacagtcccatcttgagaaactgatttctaaagccactcctaatgccagttatcttacctgagttcctttgatggcagagaatgaggcactagcttatatgcaagtgtttttttttttttaagtaattctagggagcagggcttagggactagaacagtgagacagggaaggagagaaaattgatacaagggtacattatctggttgagcattgctgacagcaagtggtcattcatcctacaagaaatgctctaagaagccttaagaaatgtgtcttagaactgtatactaaaaaacaaaaggtggggggctaggggagggatagcattaggagaaatacctaatgtagatgatgggttgatgggtgcagcaaaccaccatggcacgtgtatacctatgtaacaaacctgcacattctgtacatgtatcccagaacttaaagtataataataaaaaacaaaaaaaaaaggtgtaagcatttattcagaggctccctttcagtctgctgtatctccgggttgcatatatgcacgtctccagcagttccttcactagtgtcctgcttcctggacacgagtgaaggagaaaccccagggcaagaagctatagctggacagtagctacagatgaggtgctccgtgaagttggctgaagccagagcagaagtgatcaccaaatccatccctggaagagcaggtgtggtgagacgatttgaagtggtgcacagtggtgcctgatgaatagcctcagttaaacaaactgctcatttcttgcttgtctggaagcaatcaagcaactccagtttcttttctgaactggaaaaacacaaccatgatgatgaagccacggatctcaaatcgtcactcgagtcagcccagcactccagctacattccttactatgttaactttctcccacttcaaaataacttcgcactctctcttgtcactctgagcctattacatatcctcttttctataagtagcactctttgctgctaagtctgcctcataattcattgagaaaattgagttattctgccaggaactttctcatttttatactaccaaagttaccagcttacctgcatcggtacccatgccctctgtctacactctggctactgtggatgaagaatccctgcttctactagagaccaattcttacaaatagcaaagtccttgagaaagcaaaagatcttgaatttcgcttttttgaactcttaaattttggatctcaggctttttccttttcaaggactttgctatttctccttctccactatattatttcaagtacccacaagtaagttctagtacattctatatattaaaaaacccctgaaatccttgaccacacgtctgcttttgcctatttccttgtttttctgttcctcttaatagcaaaacatcttgaaagagttgtctatagctgctttctctacttcctcacctctttcaccctccttaacccatttctttcagatgtccattcatactgtgttaatggaatggttcttgtggctcttgccaaagtcaccagtggtcactatgttaccaaatccaatagtcagtctactatcatcttgtcccctctgcagcattcgatgaaatgacagattccttactgaaagattttcttgatattcacgaagctacactcttgtgattttactctcatcttattggacagtttttcaatcttccttgctatctctgttcttttctacccaccactaaatgttcgcggcccaaagggctctgcttgagctcctttatttatttatttatttgttgaatttacataactttcctagatgacttcatctggtctatggcttttacatatcctttataggtaatgactctcaggtacacatctacaacttggaccattcctcagaactctagactagactctctagttacctactaaacatttccgaacggtgtctgtgaggcacctaaaacttagcatggtgaaaatggtaacttttttcctttttcaaattgctccttttctagtcttccccaactcagtaaatggtgaactaaggtcaccaaggcaggttttccttacttatttttcttacaccgatatccaacacataagtccatgctattgagcctgtcttttcatcatctcatctgctctcctttctgccaatcaccctaatccttttccaggattcctgcaagagtctcccagttgccctccccacacaacaaccagaataatttttttttttaaggaaatcagatgatcacatcaaaatttttcaatggcctcctgtcacacttagaataaaatccaacaccttccctgccttactttttctattcccctttgtccttggctgctgtcttctgactccatcagcttctttccttttcttcaaatgtgccaagcttcttcctgcctcaggattcttgaacatgcttccctctctccttggcatgtttttcatattgccagctcactcttgccatttaggtctcagtttaactactatttgctcagaatggcctttcctgcctacccaataccaagcagcttcttggtcactatctattgtacggtactaattaattctctaaatggctgctaccattagttaatatttttattgcctcagtcttgtggttgtagtttattatctctctctccctttagacatgagtatcatgagtccaagatctgtgtcgaatttgttcatataagtttctaaagtgcttatcccagtatatagtaggcagtatatgttaaaggaactgattagtaaacactgtacttaccctgcaagagcagctccaagatgtttcctttagtcttgccccttaaaacaggtttctgcctcacacctccactcaggctctttctatatagaagttctggaagcccctcctataaataaggtgtttgtttagtactttaccaaacatggagagggcaatagagggactttcaagagcagtgataggattgccataagattgaggcttactctagacttttctagccctttagaaatctgctggtagaaggaagccaataagggacttttagttcatgttttttgacagactagactttgctttttgaaacttagcttaatgcactgttggtgaacagtcacaaagacataaatctgccgctgaattaaatgctttccttaaaaaccttcaagatgacgtttgaccctagccagttttatgtctcaagtacattaatgctaccccctttccatcatagtaagtcctgtgcaccagtgtagacagtctgacacaatgctagaaagggcatgccattttgtattggggatgtaagaaaaagactgcttggttgaatatgccagaactgaggagccagacaccctgtgacagatgccaggccacaggtacctgggaagtgacacaagccaggggattatccacatgagaagcttattttttaattagacaaagccaggctgactcgacattccctacatctccattagcccagggaactgagactctggtttgccgttttgtttctatcatgctcccctcacactgtaagtgcatcatgccatccctggggccaacctttcccagccttgcacaggtcccatggtttgggatagttgttccttctgtctgtttaaaggcttacaaggtagctggactggaagtttttcacaatcatgcagtactgttgtgataaaccagttttggtatttgcaagcagaggctccagaattttaatggacaaaagcaccaagtaacgagagtgattgccctaaaaattgcctttcatttctccgaaataacgaaagaatttcctcctgaccctgtggccttaagacagctatacttccaaagggacaagttagcataagaatggttttctgaaacagactcaatgtaaagatgcaaaaagtagctatgtgaatttgatatctacattttgggcttatcacaagtttcatgttcagtgaacagaaatgttggcatggctttacaagaatccctgcacattgtactgtgatggtctcctattcaggtaccaccatgtagcttctcatggtggtaatcagtgttaccaccattttggttgttaagatggacttctcttgtttggagtttcataccacaataaatgtttgttgaaatttattggagactttagactttttttttaagtgatcctactttagagtttacaacagagtacaagggatgatttatctaattaataaatctggttaatgtggataagtgaattaaggagtaggtttacacttaagtgtttattcaactgggaaaaagccaacaagaatgagtgaccgaatgcactgtacatatatttatagaggggactgattccaggagcaagtggctcactgtgcaggagagaaagtagtggtggtgagcttgcgggagtggcagtctactctgttggataccaggtgtaggtcatcccctggcccctggaaatggaagagagtgcgtggtgatgagttaactgagtgagatttcagtgtatgaggagctgttggggagaattcttgtgacaacaggcatgtgggtgggtggatgatggcctcttacccatgctgtgagtggttgagacttagcatgtgtctcttagcaaagtaggtaggtcagtgctttggtatattttggcatgaagcgttggtctacaaagggcatctttagtccctgtgcaagtggtgagttggagagaggttgctcattgatgcatatcttctctgtgtttctacttacagcgtgaagggagccagtcattatatccccttttaaactaaaacacaaaagtcacataaccagtgatagccctgtggtgcattaactttgtcatctctactaagttcaaccttaggtgacagagtttgcccaccagggatatcatgtgattgtctagagggcttccagatcctctttagaagctgctgtgcaaggcaacattatagtttctcttatttacatttttttcacctccagttccataggaatttcctagagaagctttccaacgccataaaaatgctgtagggcaaagcacacaatttacacttgggtgtaagccagtaacaagtccggcttctcctcaccccaccccttcatctttggaactgcctcggtccagtccgggtcttggctctttttttccttggtacttcctccgcagcacttgaaactatatgtggactttcacagctctgaatctctccttaaatactcctggttaagtttcttgactgatcaggctgagatgctttgtctcctcaccttgaaggagggaaaaggaggaagaggagcagcatgtatgtggcatgcaggccactgagatgttcttggaactgaaactcacatgttcttctggagaattacatgggagctgcagcagccaaagcatgctccaggttagagaaaagtgagtgagtgtggcactgggggaggatgtctcagaataggagactagggtcaccatgtcaaacataatcatgtctgtgagaggcaaagacttcctttccataaggagatgcagggaatgaatcatcattatagatccaagagacaaaggaggtcatggaggagaacgaagaggaaagacattaaagagaaaatgggagaaaatgcctgacggagcatcctcagtgtctgaccttaagcccccatgtttcttttgggatttgttttccttttcttgttctaagggtggctataagggaagccacctcagtagacaaacagaaaaagatactgtgatttgcggcaaaagaatgagtccattttccgttttggatcacccagactgtgcctctacttccacctccagtattttgtatctttttacttttgctttatgacagtgaaggtataggtagtgtgatctctgggggtggggaagggataggtaatccttaaaaataagacaaccatctgttatgattttgtgagttcttgtgggttctcgcgcgtctactgcattatcattcaacaaatatttactgaatgcctactcggtacagattctgtgccaggagccctattgtataggctactgggttaggcacattcacaaagattatcatatctagttcatactgctgtgttgtcgggtagttcttaggccatttaacagaggagaaactgtggctaatggaaagtaatttgtttaagggttgatgatagagatagtattccaagcggggctggatttaattctaatgatcttttcttgttattctgcattgccttgcttttattttaaatcagaattgtttttttattacccagaattgcctgttttctgagctgcagtatattttagagtcggccagacctagttatgaatcccaagtctcctgggattcataaccacttagtagctatttaacttgtgtaaaactgtccatacctcagctttaccaactgtaaaaaggagatataaactccaaaatttaagggtctctgtaatgattgagtgaatacacacacacacacacacacacacacacacacacacgcgtatggcatgatacaatgcaaacatatttattacataggaaatgctagtaacctttccctcatttccccttctgttgagaactgaccgttcttattttctgggtttgcagaaaatttagtagttttctatagttcttgcattaggtcaaagaactaagtccttgcatatttagtcacatcagggtagtcaccttaggcagaggtgtgaatgagaaggactttctcagtcacaaagaccaaagattatgaaactaacactactatatgtggacacgacaggaatggaatgataggaacatttggcagtgcgaaatgccctctattttgtgttttcctaaagatcatcatatgacattaactctcagaggacagattaatccttcaactggaaatgtgggaaagaagaatttctttcattgaaagcatttctttccttctttctttctcaccttcattccatatccctgtcttccatctttcttgaaaaattcgacatcaatctcgtatttcacttgccatcatccactgtgacaatgaaatgcatggcccatttaggtagggttcttctcaacggtaagatattcaaagtcagaaataccctgtataaggtgccactgtgagatagctccacacccttagagcttagtgctttttcattttagatgcttagattactactggctcatagcacagccatttatttcaatatattatttaagtctgtcatcctccgtgaagtctgttctgacttcacctccctacactatactctcctgtctctaaatttgcacagtatttatttcctattgcatcaccctagtcccatttctgcatttaatcaatggacatttattaagaggctgttttatgcagaacttactattaagtttgttgtagatacagaggtattataaattggggatattcttatccccaaggagttttcaacctggtgatgtttaggtcaccaactatccattgagactttctttgtaggcttttaaaaaatcctgcagaaaggattgtgtggctgttagctcagtgatttttggacttagatcatgaaggacaggataatgatttgtaaatagatattatgggagttgtaagcaaatgctggaagaaacatacctccatcaccacatcccatagagataaaattctactgcttctacagatcttctggttaaaattctgtggaaattgacatgaaaaattataatgacctagaaaaggacttgctcttatgacatcatcatgactagtttattttgttttattatcaaggggttatattttgcagtaagcttctgaagcacatgtacagtaatcttaaaatactcatttgaaagatcagagtttaggttctctgagatcattctttcagaggataagccccagatttcttacgatgtgatttttacctgcacaatcagtaactattctaaaaagtagagagatatagttcaatgagccatttattcacttacccactcttttgtatatttatccatttatttatccaatcatgcatgcattcattcaaaatgttactaagtgtttactgcatgttacttttcctaagagttaggaacagagacaactttttaccttcagagcaagactattcctgaaaaaccttatattgttaagaacttttatagttatcattttattcttgccagaaagaaaaacatttctcagcctaatggtgcaataagtttaatttgaatgttactagccagactcctggaattcactttctgccatgtctgcactattctaggagaagtgaatatgatatgggtgatgataacggagaggcttcagaaaagtgaatgaaggaatacatacataataattattcccagaataattcaccctgtcaggtcatttttaaatttggcttcatcttgttagcgaacatcattgtcttcttcattatttcatacatcatcgtcataactatcaccaccaccaccatccatcaacgtttagcaccgttaagacccataatactccagcaatgcgctaagaactacgagaagcaatcttttactgaaaagattggcccactctcttcaggtggttggcacctaattttatctgaataatgaagtgatagtacataaacacatatttcccagagttttgaaatttcttgagaaactctttactttggtatatgacgagaaaagagttaatggagacaacatatgttattcaggcgatagataccctaaaagccctaacttgaccactacacaatctgtgcatgtatcaaaactgcatatgtaccccttaaacttgcacaaacaataataaaaaaattaggtgatttgtattataaaatatattctcagaacatttgaccttctcaggctttcttattctttttggcataggtggaaggctgggtaaccaaccagcgttccccctttgggcttaagattaagaggcagcatcaatataatttatcagagttctgaacccacaaaatgcttaggactcagcaagactctgtgggatgggggcattttacaggggagatatgacctcctttttaaaaagtttggagtctgggtcaggtttgaatcataagcataaaaatacagtatttcttagaatcctcaaatccctagggaaactatttctctccagctttgctaaagaaagaactgttctttgtctaaaagtctcctccatatcaagcctctgtcatggactattttttccccgctgtatcagaggaagtatcttactgaatagatctgctttgctcctgtttgctgagacttattaaaagagctgactgcaaacagatttttactgcctcagtgtggacttacatcaggtagcacccaataagacttgacaagctgacatctccaatccatcaggagtggtgggtgggggagggaggacaggaaggagagaatcttatgccctcccacttcctgagagacagactttggttgagtgatgtagggtacatttttagaaatctatttaatttctgaattggagttttagggattttgcttttagaatacagggctagaaacaatactcatcttgtctatgctaaacagaaactgaaaattacacacccttaaggtcacaaaggagcaaagtccttaggagtaagaaaaaaaaatctttacaaaacactggtaacagagcatcttaaacactctgcattgttctccagccaggcagactaaaagctctaagtggttggtaataatggcaagcttttgttcagaagaaggaaacatcttgtagacacagatttctaaatatgcaagctttattgtctcaacttttgccccactctctacgtacttttcttaagcattagtgaccctgatagcaagaaaaaaaacaggcaaaaataacaaccagattctgagttgttcccttgtagaatttttgttcacatgtggaatgacgtattggttcatgtgacttcttgttctattaagaacgtcttaccaacactgatggctcatcgctagggaagtatttcatggctgctcttttatgggatgaatataggtactgatttctgcttaaataattttcagaataattagattctgtgattcatttgaaaagaagttggtgcctctttagagggagtcatactgcctgtcttcgtaagatggggacctcttgaatatgggaggcttaagccactaaggtcagtgttctttcatgatcacttgctaaaattattagggctaataggaatggagatttggtggaatgacatcatcagtgtctgctaattatgtctgctaggagcataaaaggagagcatcaagtggaccaagagtaggggaaaaaagtcatgttgttaacttaaaatggtttcaaccaaggatgttaaaagaaatacctaacgtttcttaaatgtactgtaaatgtttcatgtcttgttgattgtgtattacactctttaaaattacttctatcctgcctatattttaattctttggtatctcatcttatgcttggtggtaagcatattgaaggagggactaaatgctatctatcttggatttcttgcatcacttagcaccttgcgttgtatatagttatgctcggtaatatttattgaagtgaactaaattgagatcaagaaacattttcactgtcacatattctgaatataaattaacaccaagagaagctatctccaagaactgtttgaagatgtgggggtacctagaaacttgggagagagatattgaccatattaacttagggtttaaaattttgaaattagaaaacatacgccctatactttatagcaatgtatttcaaaagttgatagaaaagattggctttccctgatagtcagagactttataatattctccaaagataaaattctaatggaaacaaagcacactaggtgtttcaacatttatcttaggtgcctattcagtgagctttcacaaatgccttcatgggtgtaacccacacctctatcagtatatggaacatttttatcactagttgtgtctcatgccccttcccagtcaatacttgtcctctccccactcccaatacacatctatacacaaaggcgaccactgttttgatttatttcaccatagattaattttgcttttttctttcattaataatatattttattttatttttatttgttttttattatactttaagttttagggtacatgtgcacaacgtgcaggtttgttacatatgtatacatgtgccatgttggtgtgccgcactcattaactcatcatttaacattaggtatatctcctaatgctatccctcccccttccccccaccctacaacaggccccggtgtttgatgttccccttcctgtgtccatgtgttctcattgttcaattcccacctatgagtgagaatatgtggtgtttggtttttccgtccttgtgatagtttgctgagaatgatggtttctggcttcatccatgtccctacaaaggacatgaactcatcattttttatggctgcatagtatgccatggtatatatgtgccccattttcttaatccagtctatcactgttggacatttgggttggttccaagtctttgctattgtgaatagtgccgcagtaaacatacatgtgcatgtgtctttatagcagcatgatttataatcttttgggtatatacccagtaatgggattgctgggtcaaatggtatttctagttctagatccctgaggaatcgccacactgacttccacaatggttgaactagtttacagttccaccaacagtgtaaaagtgttccaattttccacatcctctccagcacctgtcgtttcctgactttttaatgattgccattctaactggtgtgagatggtatctcattgtggttttgatttgcatttctctgatggccagtgatgatgagcattttttcatgtgtcttttggctgcataaatgtcttcttttgagaagtgtctgttcatatcctttgcccactttttgatggggttgtttgtttttttcttataaatttgttggagttcattgtagattctggatattagccctttgtcagatgagtagattgcaaaaattttctcccattctgtaggttgcctgttcactctgatggtagtttcttttgctgtgcagaagctctttagtttgattagatcccattgctcaattttggcttttgttgccattgcttttggtgttttagacatgaagtacttgcccatgcctatgtcctgaatggtattgcctaggttttcttctagggtttttatggttttaggtctaacatgtaagtctttaatccatcttgaattaatttttgtataaggtataaggaagggatccagtttcagctttctacatatggctagccagttttcccagcaccatttattaaatagggaatcgtttctccatttcttgtttttgtcaggtttgtcaaagatcagatggttgtagatatgtagccctatttctgagggctctgttctgttccattggtctatatctctgttttggtaccagtaccatgctgttttggttactgtggccttgtagtatagtttgaagtcaggtagcatgatgcctccagctttgttcttttggcttaggattgacttggcaatgagggctcttttttggttgcatatgaactttaaagtagtttttttccaattctgtgaagaaagtcattggtagcttgatggggatggcattgaatctataaattaccttgggcaatatggccattttcacagtattgattcttcctacccatgagcatggaatgttcttccatttgtttgtatcctcttttatttcattgagcagtggtttgtagttcttgaagaggtccttcacgtcccttgtaagttggattcctaggtattttattctctttgaagcaattgcaaatgggagttcactcatgatttggctgtctgtttgtctgttattggtgtgtaagaatgcttgtgatttttgcacattgattttgtatcctgagactttgctgaagttgcctatcagcttcaggagattttgggctgagacgatggggttttctagacatacaatcgtgtcatctgcaaacagggacaatttgacttcctcttttcctaattgaataccctttatttccttctcctgcctaattgccctggccagaacttccaacactatgttgaataggagcggtgagagagggtatccctgtcttgtaccagttttcaaagggaatgcttccagtttttgcccattcagtaagatattggctgtgggtttgtcatagatagctcttattattttgagatacatcccatcaatacctagaacttcatataaattcagtcataaaatatatcttactgtatgtctggcttcctttgctcaatataatgttttgagattcactcatgttgttgcatttatcaacagtatgctcctttttaaagctgagtaatataccattttatgaatataacagaatttattgttttctgttgatgaacatttgggctgtttctagtttttggctgttgtgaataaaaatgctctgaacatttttgtttatatgcttttgtggacatatgtttttatttctcttgggtatatacccaggagctgaataattggttataggataggtacatgtttaaccttatcagatatggccaaccatttttcagagcggtagtatcattttactttctcaccagaaatatatgaatgtttgtcaacagtgggaatgtaatataggaaatcagacagctggaagaatgaaaagggaatgctgagaaataatacctgccgggacttcgttttagagctggggttgtggttattagaatttagaagctcagaggtagtgacccgtggatctggtgcagtacttagagcctcaaggagaaggtactgctcagctatacttgttacctgtaagttaactgactctttcctctattactaacattttggtcactgagttccatccagcaagtattttttatattaaccattatattgtttcatttctaaaatttctgtttggttcttctttctatcttctgtgtctttgctgacgctttcgattttaacttgttgaaagcatgttcatgattgcttgtttgagtatttttataatagctgctttaaaatcttggtcagataatttgaacatttgtgtcatcacaatgttgggggcctgtcaattgtttttttcttgtacaagccgacatgttatggttctttgtatgctgagtaattttggattgtattttggatattttaaatattatgttatgagtttctgagccttatttaaagccactcagtttggtgacactttgaattctggtgttcttctcaatctgcctgttgatattttattctcagagacctcagataggtgtgccatgaattttatcaaggtttcatagttgtgttaagtaggagaaaaaaattggcatgtgttcactccatcttatctggaaccagaaccagtaagtttggattttgaagacatacttcacaagatgaaagaaaaatcacttctttatttatgtaaacctgggtttctcatttattatctattaccaccattagaatttaagctttacaagggcaaggatctttgttctatgtatcccaggtactgggaacagagtctggaactaaataaatattggaagcactcaataaatattttcgaatgaatgaaaaagctaataaacaaagaaaacactagtgtacactgaacagtactgcaagaagatagttagaattaccgatacctgtcaccttggataagttgattaacctctctgtgtatgtaccagtttttttcttgtatgtaataggaaaatgatattttatagaaagaaatgatatatgtaaagtatttagcataaataagtgctcaaaaaaccccacaaattcaatgtctcctctcctcttcaaatgccaaaataataaagataacttttaaaatgtggagcaagaataaccaaaggatagacttatttcatggggcagttggtcttatgtaaacagatgataaatgaaatcagaaatagtccacctctattttaattacatcttctctattaagaaaaatgatcttcgtatggaaaaagggagttcatacataggctttgacgttagagtggcctcactggtgacttttcttaatctctcaggtcgaactcaattctctctgtaaaatggaaataacaatgcctactcccacaaagttgttttaagtgtgacagaataaaacttacgggaagcgtgggggaaggagaggacatagcctctcctcattacccagcctcaaagagaatcttataattgccagctcatttccaaaactacttctattgggaagtggtaaattcacaacctttattagttttgctgctgttcaccttttggtctgggatagctggactaagttcaacacaagtctgtacctgctgagtcacagcccactctgccttattgcctgtaactcccctgttccttgaacaaactctacatgtatcaggcttctagccttgcttagaccttcagcttgggtccagcagatcagctctctacaagagctctgtgggagacctaggagcctgtgcctgtctctctcaccatgattgcccagtaaacttgctgtatattttacgtgttacaaattctcaaagagatttgttgctttcattccttcttttcaggcattgaatagaaatattccaataggatttacaaaaatttaagttaaatttttttttcaattttactgtccacaaagcagccgtgttttgtatatctgcacattctccacctatctcaagccctgtaccgaataggtgctaagtgaaaatctcagattttataactgctgttcactggtgcaagagatctgataagtgttcaaaaaatgcattgatttccctgatttagttgtttattgatataacactgtttaacttttctttagataaccacaacattccaaagaccccaagaaaataatgttaatcttttggaaactacataaacgtatagcaaatgggcatctctatgagtatctacctctgtttataattctttggcatttagctattgagttcaggaagaagatatagtgattaatatcactgaaagggaatcagaggcttcttctcctgagtcacaggccatctttcataaaatatccgttaaagagttgcaggagacctacttgtttgggcgttttcccctgtgagatcttctgagatgcaacctgatgctggtgtagatctgttgttctcccttgaatgaattgctggagtgaaagagagactacaaggccttcattaatggagtaagagctgacagaattgacatttggtaggctcttgattcaggaataaaagcaaagtgagattttcactttaattacgatcttgtgttttttaccattcatgctcatagattaagaataagacctttaaacagaaaagagtttacatgctgaccctcatgagcagcgagaagtgacgggttggaaaacctcattgcctctctatagccaagcttgggcaaagagatttttacaagggataatagatggggtggctgttcctgagaggaggaggaaggagactgtgtctgaaagcctgcatcaaagggaaagaagagaaccatggaagctctctgggcctgggaagatgccttggaacaaggcaggccaaaatgtctcctgctccgatttactttgtgagtgttttgtccctgtagctgtgtggagctgaggcaaacaggactcacacagttctgacattccagtttaggagattcaaaaaatcttcctagggcaggtggcatctgagcttgggctttcaaggtggttaacgctttgatggtcagacatggggaggttgggaattccatgttcaggctacaggaggaaatgtgtgagattaatttggggactactgctgtccatacagcaacatggcataaagctggggctttagatctatgggaggcatgtcggtgtcctggaaaatatgattaaatagtgagtctactttgacctttttattttctctgctgattgagttctccttaggttgctggaagatactttattttatttctaaccatttagtctcccactgggaaagtatgagtttatgcatttttctttcgatcttaacagagttagaatatgatcatattgaagaatggcatttcttatgtctattcagtccttaattctcccactaatccctgctgttttccagccttattgagcctcagtgttttgccagttccagtgtatttctgtgacccatgagataccaataagcactgtaagagactcatcaaatcaaataggtggaggggacctctagaggtcttggtggcatagctagatgattaccaaagcctgccaaggtagagaattgtttactgcctccttgaagcactccagagatgaggatgacagtctctctcaaggactttattctactaattaatcagccgggaggttcttccttatgtctaattgaaatctttcctgatgtaatttaatttgtttgctcctgtgttgtctactgtgggcatggatagcaaatgattactacctcactaataacaacccttcattaatgtgaagccaaactctcgtcacctttctgcgcctgctgtctagactaaacaattgcagtttcttgcactgttcatcaaagggtttattttaatgtctttagccatcttgattaaagttctctgaactcttgagtatctctacattatttaaaaataattattatagtaaagagaaatttagactaaattcaaagtaactgctttggagatctcatcaatgactttcaatgtggggaagcttgtggactatttttggtgaaaacaaaaatgactggtgttacagccaggtcattagacagggccatgggtgatacagtgcattttttgttgttcattaatgtgttaacagacataatccctttgtggtatacaaacacattttgggaatccttatgaacgtatatttgtgtgcctcctgccatgaaagttcaaaatatagtatacttttaaattataaatctagataatacaagacactatgccttatatcatccatgcctttctaatctgatcatctgggattatttcctctagtgtctcttagagtgccttgtccagagaatttgaaataatagacatgatgattactacaagtaactgtgagatcatatggcatttatttcctcataaaatggctttgtggtttatggagaagttagggagataatgggtaatagggaaaagctaaggcaagagagcaggggaatcaaattcaacttttgttaaatacctcctatgtgtaaagcacctgctagggatggtggatatatgaaaatgagtatgcacagcaaatcattatcagggggaaggaaaaaagaatggataggattgtcaaatccaggtatgcttatatgatgacacaaaggtacctgggaattggagaaggggctgcctaaggatgtattggttgtgaagatattccactgaaatcagtcatggggcattaatattttaggcagaaagaaaccgattcctccaaattagggctcagtaaaaaatgaggaataaaagtatcagtgacatgtgttttatttacaaatgagaaatcattataataatggttaacatttttgagctttgacaatgcctcaggcaaaggacttagaagtccttttacctgtattaattcgtttagctctcacaacaatgctgtgaggcagatgctgttttatctcatttaacatagatgcagccatggggagaagaaatctcatggaattacatggggtgctgggtctaactggcaaggaaggagttcacttggagatggtgccaataggatttggggggcactagattaggtgggtatgtgggtgtctcctagagattgggatggcactgggggatggtgtgatgaccaagaagaactgtaatgctgtgggtgttatttcagcatattctgaaaatagatgaatgcagagttagagaaatctgttggtgtgtcaggatttggtttgagtcgttaaaagatactgggtaaaatgcatgttcaaggattggccattcaagcagtgtgtttcacagggatcaaatccttcttcctttcatcagcccatgcccttctcctccatcctttccctttctcattgagagttttcccgcaagccctggcattggctctgcatggtggtggtgtagcccccatctggctaagtcctcctcatgcatcctacccttgagcatccatgtcactgtcagcctcccggtctcagcatcagacttttcctaattgatgactttgataccttcttctcataactggagatgccagcctcatgaccacattactattttcttatctctctgataaatctctgactaattttcatttctccccaatcttcagaactcctctgctatcctgtccctatcttcttgcagccatagccttatcctagcctcttcctctcttttgatgacagagacaagtgaatgtatgaggaatctgtatactgggtatatttctgtatgagttgagtttgaatctgcatgtcattgtgagtgaaagtgactatgtgagattacatttgctgtatgtatttttatgtttcccaagtgggaagaggcagttgggaataaatggattgaagttaaaaggatcccatggtggtcaaccttacttaaaataaggaaaaggtttattgcacaaagatatgcctatgagggtggttatccagtttttgtgaattgaaaacatcctaaattttcatgaagagggggttgattaaattttggttaataattcaatgaaagattatgaatttttaaaaatatattgcatatttgtgtgtgtatgtgtagagagagagattaaagtattgaatgaaaataaaacattacagcagttatgtataattgatatatatttctgttgtatttgcatattgatgcctagatgttttcatctgggaaagttgctaaaataataatgtgggttgtctctacaaagtgaaattattattatttttcttaactgcattttttcatttgctctaatgaacatatagcatgtgagtgataaaaaatataaagttgtgagctgacaatagtatttcaggaataacacaaatatgaagagtgggcatcagcaagaggtctctcattatgcccaaataagggaggggtttaaaggcctgttatcttttctttccctccttctctagctggccatatgggagtgaaatcacttaaagaaaagcccaacccttgcatacaatctttttctaaaaaccctccccaattagaaatttatttgaggtaataaacaagtatccctgggagcataaaaatgtagtggtgattcacaaaacagtttaacccacatggcacctttgcacaaattttttaacgtgtccattcctccaaacactttcctgccatgtgctgggaaattgacatcataaaaatgctatgaccgatgttcatgttatgatgaccctcttctaagtttgtgcagtgccctttctatacaaacttgtaagcaatgagttaatttggaatgcatagatttatttcttcctagtctgactgagactttagctgtaaggaatgggagtttgacaagcacataaacatgtggtatgacaggaagggagagcaaatgataacttaaaatttttaatgctggcctggggtctcctgtttgcatgagagccctggaaagccactctttaactcttgtggggtccgtctttatggggtatttggaagtgagttgaatccctggttataatggagctggctctcagggatggatagactttcactaattgtgtatggaccccccggagggcggattaatggaatctattcttgtgttcaaatcgtaatgcttatttaacagctgtgcttcctggtttagttgatagccgcttatcacagtttcaatcctagatcttttcatttatcactgatacagagacattccctagtctactgaagtcaagagcataataaggccagaccagaaaaccaatcaatctctgagcaaacagatgccatgtacatgctctgactgctatgttctgttatgaagtcctccttggatctaggtagcacataaagttatcaaataaaaattaaataccttgagattccctctttaagggaaagatcctggtgaacatatttttaatcagtaaacttatgaatattttcacaattataattctgttactctggatgtgatggtagtagcttggaaggaatcaagctaaggtcctatgggaaatactttctgagaatgataatggaagaacaattacgtacatgaaagagatccataaattataaaacacttatacaaatcttaattaatgtgattatttgtcggcaaattgctgaagttctgttattgctgagattattcaaatgtagaaagaaaagacttcttggagtttgaattgacaaatactgatttgtgtagcaaagactcaacttacttggtagaggagttgcatatgaatttttcaacaggccttcaaggattcttctcacagctcttctgaacctctgctttgctttgtgtttgtcttttatccaaagaacactgaagtaaggctgtgttcaggaggattggtggagttcttgtctggatctttgagtgctatgcttgaagcaagccaaactgaactgacagcagtttaacacacattgtaatgcatagtcctgggcttcttgtgctagtcatccagtcttcatcatcaaaacaaaaccttccattgtgatcttgcctggatggtgcagttgtagttaattcagttagagcaggcactgcttgttgtagttggagggatgaaattagacatctactagaccaagaacactgtggtggcaggaactgtctgtttttttttcttttttttttttttttgtgccactgaatccctagtgcttcacacataatagttgcttggtaagtattagttaaatgaattttttgaatatgttacagagggagaccaatgtggtactttaggcagaagtcaaacaaaaagtattgctttgacaggattatgacaccccatgaatttttagtcttccaatctcaatttcataagtttcttagagttggtcagaatcaaggcaataaccaacctgatatggttaggctttgtgtccccacccaaatctcaccttgaattgtaatccccataatcctcataatcctcatgtgtcaagggagaggccaggtggaggtaactgaatcactggggtggttccctcgatgctgttcttgtgatagtgagtgagttctcttgagatccgacgttttataagtgtgtgttagttcttcctgtgtgcacttcttcttcctgctgccttgtgaagtaggtgcctcgtttccccttcaccttctgccacggttgtaagtttcctgagacctccccagccttgctgaattgtgagtcaattaaatctttttctttaaaaattacccagtcttgggaagttctttatagcagtatgaaaacagattaatacacctcaccaaactcatcaaagactgaaatgtaaaccagttatcatttagttacacagtttccattgtggatttttccatagcaaatcacctccaaacttattgtgttaagttaacaacacttatttatctgctaacaatttcacagtttaggaaggacccaacagggacagcttattttagctccaagtggcattagttagagtgtttgacgagggctggaggatccactcccaaggtggggtactcatatgcctggtagactggtactagctgtcacctgggagtcaccaggactcaattctcttccatgtgggcctttccacttggccactcggggttcctcaaacattgtgactagtgctgcctggcaagtatcacttctgctgtattctcttggtcaaagcagttacagcccaatccagagttaagggtagtgggggtatgggggaagatagaagtagactacctcttgatggagaaagtgatagagaaattgcagtcatttttaatgaactccaaacattcactgaaaaatatctattaaaaagatttgtcaatcacctcaagttggtttttcgttatgttctcattgtagtagaaaaattccacagttagcgaaattacataggccaagaggagggggatggtatttgacctccttaaaattgccatcagtttctctttcaaatcctggaaaataggaatacaatgagaataaaaccagtgtacttactgtgcagatgatgtctcaagaaaagtcccagggtactgacatctcccatcccacctccccacagacagacagcgtattactgcccttcagtcctcttttgttgaaattctggagctgcctctgcccagttacaataaaaagattccctggtaagtttagaaagagaaaaaggagtgaattacgtggtctgagggtctggtgtcactgaagttataatctttccatctcaactagattgttatctgccaaaggtatttatttagacaagaaaaaaaaaaaaaaggctgggtgcggtggctcatgcctgtaatcccagcacttcgggaggctgaggtgggcggatcacaaggtcaggagttcaagaccagcctggccaatatggtgaaaccccatctctactaaaaatacaaaaattagctgggtgtggtggcagacacctgtagtcccagctacttgggaggctgaagcagaagaaatcacttgaacccaggaggcggaggttgcagtgagctgagataatgctacttcactccggcctggcaacagagcaagactccatctaaaaaaaaaaaaaattattttttttcctttcaggtaggtttctcctctccaaggtgctagaaaagtcacttttttatacattaattcttcttttgtaggttttcaacagacaagtttcctttgccaaccctatcttttttcagagatccctgttaaacaagtgatacatgttaattcttgtgattcttttgcagatttcttatactatttgtaataccttgataaaagttccaagcttgcttactgtacttccatttaggagaccctagtggtcaccatttattagttatctattagttccagaaagtgtatatgtcctactttgtagcacaacaatgcactgcaggtattggggagatgggacctcagagaagccaactttcccaaggcatataatacgtacacagcagcaatacgaaaatcagaacagaagaaagttcactgatattcccaccatcctaacataagtattttaatttactgtagcctttaaccttatgcatgcttacttttatatagttgtcatcatagcatgtgcctaatttttattctgcttttttagacaatgtttcaatggatggtcaccttcccaagtttctacatgttataataataattttgatttggccgggtgcggtggctcacgcctgtaatgccagcactttgggaggctgaggcaggtggatcacctgaggtcaggagttcgagaccagcctgagcaacatggtgaaaccccatctctactaaaaatagaaaagttagcctggcatggtggtgcgcgcctgtagtcccagctgctcaggagcctgaggcaggatagttacttgaacccaggaggcagaggttgcagtgagccaggatcgtgccactgcactgcagcatgggtgacagagagaaactctgtctcaaaaaaataaaaataattttgatttgttatgtagtactgtatgcggatgatcaaagtagatcttctttggtttttaaaatatattttttctgtacataaaagtaatatatgtatacacattgtggaaatatttgaaacaattatataatacactgatttttatcacacacaaagatgtaatactgttatattttttgaatattttctgccaggcttttcaaaatctgttataaatatattttgtttattcagacacaagtcattttatcgtatacaaaattgaaattatactatcaaagcaacttcaactaatatttacttgtctccacaaaaggaacattttgagaaattccctactgtcttgcttttctataggggctctccttgtggagggtttcattgtttcaacaaggcagggatttgctgggatttggagacgttcctaaatgtaaaatcattccgctccccgcgccccgcgccccaactccaccgcatggtattgcatcagtatagaacagcatgcacgcgcatccctcagcagtgtgtgttatccactcattgcctcatcaaccttggagcacggcctgataatgatgtggggaggtgacctccagctgaatgccgaagctggaagaaatagtgctgttctgtgcaatggtagttgcatctgaataatgtcccagcttctcatttaagaaatgctacccaatggagaagagcaggtggggtctatttatcattctacatgtcagatgcaaaagtgatcttatctgtgactttggtgcaagttgcagtgtcacatgttggattgagcaaaatgcactctcaggatcaacattctctgcttaagtagtgaaacagtagtgttggtgcaggttaactgtttttgtgtgtgtgtgttttatacagtgaaacatttttaatgtgaaattcttgaaatgcacacaaaagtacagaaaatgctaacttggataccatgttttcacgcacagatttaatggatgaggttatattgcttctgatctctttaaaaggctctatttcattggtagggatattgtccctaagtgcaaccttggacaaaatgtttgggatgaggaacatggagtagagcctctttgctgaggctccttccagcccccgcactctagttcctgcttttggaatgtcactgtcaaataagaagtctccttctagtgactgtagcacctacataagagagaacaggggataagaatacaaggggagataaagtcaggtgttcccaaaagctagtagggtgacaagggagaaatggggtagggatacggactcagctagatgttagttgcaccatctgtgagtgtgtcagaagccctgatagactcaatagactgttctgtttttttttctaatcacatttagagacaagctgcttcctgaattggatgaattttaaggttatggttgcacatttaaaaagtgaaaattgaggcttttcccattctttgcctctctcctgagttgtgggagtaattcatggcaactcagaatttacatcttagagcaaacttgctgggtgatttgtcttcattgcattttgggggtgggggaataaacctcatcaagcagggcctgattttccaagagctcatcattcaggcacttattacccactttgtgcagtttctaggtcttttgcttttcaccctttcccctcctgctgggttttggtcattttgctgcttgttaggacttccaccagctgatatggagaagcataaagaacggctaaagcattattaagttctgcttcatggtaggagctctgcaaagggcttggtgggggagaattttgaaccctttgcctacaataagttttggagttatctgttgattttggttaggtatgccctccctgtcctccattagtactgataatgaagagctcacttacaggaaaacaggatgaaagaggatggcaacatacagctgagaatcacagtgagccatgacttaaacatgttcctgtaatatgatgccgtaatgagagggagcccaagtccatatgagttcattgaagtatcaaattggtgtgcaatctttcttctcattcagcataggtctggcacatattggagtagaagtttttagtggcggtgagactgcatggtgcaggtagattctagcaacttttttattcctggggcaactttttcaaatgatatgcactgacatctctgagatttgagaggacatcagggtgtggactttggaataattactgaagcaatcatcttatatcccaccatgcaaaagagatgttggtgattttgagaaggctgaacaagaacaatgaagatagttaaagaactccaagctagtattctcatgtctgaagataggagggctcccaaggtagttacacaccttttgttacatatataaaagtttacttgtgggatgctgtttccctcacatcattctgtatactcatactagctcagtcttccaatgtgcaacatgattatgctgcaccccttcttggtcttcattaatgctccaggcttcctttccttcttgactcccaagcatttcttcttcctttgccaattttaataagaaccagtcagctcacctttgaccttgaagtcctaaggaggttgtagttatagtaagaaagatcataaatacaaggtgtcataccttgatagtgtcctgcagaggtcagagctatacttattctccctgcagtcacagggagcaattgatgcatttaaatccactacatttcacatgtcacatccatccactcttcacaatagtctcagattattctccagcatgcaatcatcatttccgctactggggttcaggtttgcattgtttcccttatctacactatgagccgcttaacttgtctttatgccaaccactatttttcttaacaacaatgaaaaaaattaattagaaaaattaattggatcacttatctgccctgtttgaaaactgttcttgggtacttatttataggaatacagcatcctgttcaaaagcttcacaattggccctgttttcagccttatttcttccattgcttctgcccaccctgactccgttattctctttcctccctcctgtcctgcagctataccttcatcattcccatactcttctttgtacctgacacactctctggactctccattcttctcttctttgccaagtagactactcgctctttcagacccagctaaaataactcccctggtgaagcctgaagcttgctccccaccagcttcttatgttcttacttctctataaaacaagcatagtctttaaaccattgttttcatggggttttcctctcctcagctttgctgccttgactcagttattgctaggtcatacacctgagagatatgacagtggcaggccagtgtttggcaaggtagaagggaaggaaggggataggtgagcgaaagatgtaggctttatgcactggtttcctatcctgtctgttttctatatgatggttaggatacaccccaaaatacaaattcctttattttcttgacaaagacttctttcacatcagttttctctctttggtgaattgagtgggacaatgtagaaagcttagagatccctttgcagctttccatagaacagcaaactccttgttccttgtcattgacaccactttaaatcctcttaattcttcagagtctgtcacttctaaagtaggagcacacatagcctcaagtcttatgaagagggaagaatgaaagaaaaggcaaatgaaggccataaaaaactttgtaatcctttacttcattcacagagacttttcttcactttccccagtcctggaaaaagtaatgtgagtagtgtctcatctcttctcagaagacacattctttttttgtctcatcatatttccatgtatccttggtgcctgtttgaggattaaaatagaggagaagagtggatatgtggtgaccaatattaattaatttatatatatatatatatatatatatatatatatatatatatatatatgacattttcttgcacaatagactgggaaggagctactgtagtggacttaatgaagtataattttggggtaaacctcaattttaattccagtctgtcacttactagctgtctgacttcaacaaaatgagtcaccttctgatccttagtttcctcatctgtaacatgggattatattaggtaacatacataagacacctgtaacacaatcagtgcttgagaagaatgatgacttttcttacttatccccatgttcacagtgcctgacacatcatagggttcaatgagcatttgctgcataaacttgacactgcctttgtcagatgcctcacctggttaatttcattttttatacaattattttgttttggaagagcttctccaaatatacagttgtataaatctaaaccagaaaatgatggtgttctcaaacagtacgagagctgagtgttgagctgtgtgatgttcaagggctcttttgacttatctttaatttttctggcaaggctatgatgtagggaagtacttctgtgcatggacaggagaaaaaagagtgtgcttatttctcattcaaaatttggctgtttattgcaccttaagacctaattactctcccttgctgactcggtcctctggtggaacctaggttctctttcttcctagttcccctctatcccttccacccagaatttataggagagtgcatctgagagcagactcctctagatggtagtagttggtgaccagaactggtctaactcatttttcagtgcagaaggacacttttctggtctcataagtgccctgggagcagctctctaacaggtgtgatgctgctgttccagaggcaaggaaaaggttcctcaccactgcttggcaaggcagagagtaggggagtcaccggagaaggggaaggagggatgtatgcttcctctgatggtttccatgcctgtctacacaagacaaccacccagggagatttaaaatgcatactatgaagcagggatattgaatccctgtctttcaagtgtggcccaggaatccatatttttaacaggctctccaggccaatgtcagggacccagctcagcctctggatgtaaacctgtgagaagcagccctgggttgcatgttatcatgggctctccacgagtgctgctggaaggcataaaaatactggagagcttgcggttcttatatgtgatgacctaaaggtgtagaggaagggctataaggtatatgccatgctttatagtttttccttcacatatatacatattttgatatttaaatataaaatatataaatgtgtatttactttatatttgctgggtaattttaaatgtcccaagaaacatgcaataagtcttcacttaacttcatcgatagggtcttggaaactgcaaccttaagcgaaatgatgtagaatgaaaccaatttgaccatcagctaattggtataaagacttaagttcctatagtatctctctggtcacaaaaacatcatcaaacttctaaataaagacctaacacacttctaatattaaacattaagataaatgtgagctatatgtatacttaagaaagattagaggctgggtgcagtggctcacgcctgtaatcctagcactctgggaggcctaggcaggcagatcacctgaggttgggagtttgggaccagcctgaccaacatggagcaaccccatctctactaaaaatacaaaattagccgggtgtggtggcaggcgcctgtaatcccagctactcgggaggctgaggcaggagaatcacttgaacccaggaggtggacgttgcagtgagctgagatggcaccattgcactccagcctgggcaacaagagcaaaactctgcctcaaaaaaaaaaaaaaaaaaaaaaaaagaaaagaaagattaatgaaaataagtaatgattactacccaactattcgagttcagggtctcgggtaaccagagactaccctaacagctgagggtcaaggtgaacactgacctaggacaggatggcatcccatcacagggcacattcacacacacccatacttgctcatgctggcaccatgtagacacggcagttcacctaacgtgcacagctttgagatgtgggaggaaaccagagtaactggagaaaacccacacagatgtggggaaaatgtgcaaactccacacagacaggggccccacccagccagaaatccatttttttctcatcaatgtaaggaaacaaattgaacaaaaatatgtcatttgaggacctgctgtatgtattctgagcacctatattctctagggacatcttgactatacttttaataggattctccctgtgttacagggatagatttcaccaatggacagcctggctccctaacgtatgaacttggtacctatcttcatagtttccattttacctgcccaataatgttttcatcaactttgttacccctcctgaagccacctggaaaataaaaaagtatattccttctgtgcaagttgctgaaaaaacttgggaaagtgagttaattgctacagggaaattatttacctcacttaatgatttttctcttggcttcaatcgggggctttttaagcctcattcatgtcatcctgagaccttcctgaatgatctggatttggcagcctcgacactttagacacattctcactcaaactagagctttaggtgtggttagaaaaacaaatgggaagaagagttaaattcacaaagataattcatctcctctaggtggtttttgcccattgctgagtgcttgtcttctctttccaccaacacctacttgcttggatcttgacttattttggcagttctctgtacatgtaatgtggttgccatggagatgttatccagcatgctgcatgctgtttcatctcctctccatctcttcatttctctctagtgtgtgcttgttctctcacatttctatctcttctacactcaccccaaccccctttgtaattgaagacatcaaacactgtatttcttcaagctattttgcttcctttccccaatcatatcgaatgtgtttttaacttaatataatcaaagcaacctggtaatgactggaaaagggggtaaagaaattgactgaaatgctaaattcctgtaggttatgctaggatgcccaagaatttgagggaattcaagcaagtggtaatcaaattaacttcctttgctttcacagggattaagtctttactgtggttcagagagacttattcataatacctttctgatttccacctgaactacttcatcatgtcctggtgttatctacaaacaagaaatttctgaactatcctcaactcttaatttcccagccatgaaatattcacttcaggcattatttgcatggacccacagggactctctgaagatactgacatcctgggttattaagagttgggccaaatgtagagaagatcttagtgtgaatatcaactattcaccctcaccttgctgtgatgtgtgtagggagtgaggagtgggaaggagtgagaatgggattttgtagttatgtgcacctaaccatgtgaagattgagaaaaagattattcctcttctccactgaggatattttaattttcctcaaaaattgaaaagtactagaaaaaaataatgaataaatgtcccttttgtttttctagtttctcttaaaagacctcctcatctcaatgttataagtaagatgaatttgatttcatttctttccaaactgacaaaatgatttacgttagtaaagaatattcacatattaattttaacatatatttcagattcccccaatgctttgagtttctaaactaaaaaaatcatagccacaaactgcaatatcaagaaattttatttatttttctttcttacggaataaaatatttcagaaacaaagagaaatcgcttttgatttctctaccgatcattaattatgttcactcctgtgtcagctctctccaagggcacaataccatggagagaataaggatttgggtagattacatgatcctcacaggcagatctatgtttttatggcagtgtaatgagaaaaacatcaaaagggagaagtttaaaaagagtctgggcaagaatgaagtcaatccaaactttcatctcattctttagaaaagaaagattatagataatatattctttagaatttattctttttttaaattaataattggaggaattactttcttccacagggaaccagtactcaatgccagttgcatgtgtgtgtgtgtgtgtgtgtgagagagagagagagagaggcaaaaaaaagtatttgtaaatagattgtgcgtgtgcatgtgtgtgtgtgtgtgtgtgtgtgtgtgtgtggtgtgacatagaaggggtgtgggtgggaatgagaagtgaggaagtagcatgggaggatttcaacactagtcttctgcaagtgaaaaacaaatcaataagtattattgaatacttaccacaagcaagatactagtttgggttctgcaaaggataacagaaggacgagatttgatttttacctttaaatagtatgttgtctatcatggaagacaagatacagacaagtaaaaaattaagtaataaaagggaacagaacaagtcaagtgaacaataaatgaaatgttgaaatgtggactggaggcaagataagacaagaggagagaagaggggagaaggcctcagattgataggaaagtgtagagagaggataagatttgatctgagtccataagcatgagcaagagttggattatgctcaattgagagaaaatggaagaggcagaaagtgtaaataatgtttgtcaggggacagcaaagatggttcttggcttcagcaagagttcatgtaaagatgagagaattccaaacaggtagaagggaccagggtgtagagatcctttgctgagagcagactttggctctaggcagtgcggagccattggagatgtttgagcaagtagtgatgtggcactaagaaatctcacggtaagattaaatggggatagtattggggagggtggcaatgatataaggcaaagggcccaggaggaggctgttgcaagtatctgggtatgagtggatatatgcctggtctagggtaaacatttagggagtagaaaagaagggacaaatgtaagaatcattttgtaaagaaagggaagttttggaggatggattgggcatgggaaattaaaagaaaaatgttggagacagctggaagatttcaagactaaaggaataaggctagttaatatttactgagtgcctactatgtgccaggcacctttccaagtgcttcataagttttaactcattgagagagaggaagaattgaaagtcagctattttgagagcaaagataaagccaatcaatttcaggcactaagagtttgtaatagggataaatgcaagtggagatgactggcaaaggatggaaatggggaataagaggtcagacctggaggagaagaattggactaatccacttagaagaagagtttgtgccatgggaatggctgatatctgcataaaatgagaaataaacagcctgttttgaatttcctttaaaaagtaaaataagagaaaagataaaggcatccagtaaagaaggagaaatcacagatgaaggaggagaactaagataacatagcatggtagtatctagacagaaagcaatttcaaaggaaggagctattctacggtgtgaatctgtggagagatcaaacagggtaagtactgagactaatttatgtatttgattgtccagatcataagtgaagatcagcctgtcctattgagggcaattgagagttgactatagctccaaagaaatactttaatattgtatttttaagtccagagagaatttggatattctgtgccaaagcaggataagtttttgtcactattaaccaaaccaaataaatattctagctcttattgtctgcctttaacaagaactccaagaattcagtcttagactttcataactgacttccttccagagcacgatctaagaattaattcctctataagtccagtcaagcttactgctgtgtggtttttctcctgtttttttataaggcaaattcattcaatttcttcacttttttgggttagtgcttgtgaaatatgacagattgacagcccttagagactggggttctctaattatcctatgaacatagctccttaccagtaatgtgcctctggtctctcttagggctgtaaaaagcctgtgtgtttagttgactttcctgtaggcctctttatggtgatggcatcagggacaatttaaaacaactgatggaccactggttggtgtataaatcataatcaagagcctagggcttggagccattcagatctggatttgaattttagttctaccatcttagaagtttgtggcttctttcttttcttctctactgaccattgcttctcttgacaacattgttcttagcgtggggcattggaaggaaaatgggctttagaatcattcagaagtggatggattcaactcccagtgctcccaaccttgggccttcattatagtatttacctattattttatatcattgatgtgagaatgtaaaataatgtaaagcaccaaaaacaaggctaggcatgtgctcaataaatggtaacattgttgggttttttaaaaaattgagcagccagagcagaaataagacttccaagcaacttcacttatagatcagaaagctatgagattcatttaccttgtggagacaaagttctgaaactatgtgctgaagaggggaaaaatgtcagtcagcatattttgtacatgaagctaaactacagttgacttttaattgatttgattcatcctgggaatccagtgcctaagagcagccagctaattcttcctttcattcatgtgttaaagatgaaattataacagaaagagagaagacaaagctgtaacagttttaaagctgtaagtgtggtggtctcattgtctaaagacacaggggaacctggcttggacttggtcatgttaagtttgatctgagcattcaagtagaacattccaatcagaaatattgagctgaaggtcagggaattggtggaacctatgatagggattttggagaccttggcatgattgttgatgttatggctgtgaatgcatctcagagggagacaatatgggctcaaaactgaaccttggcatacccccaaattggggagtttcaagtcaaagtggagaaaaaatggagagatgactagcctgagttgtataaggagaaccaagatattatcctactttaaataataaagtacaaaaaagggacttgctaaaaaaaactgggagtatcaactgttagagactatagaacacttaggagaatgatgatacagcaaaggctactgattttatttttgttgatctttgtcttagtttattttgtgttgctataaagaaaactcaaggctggtaatttgtaaaggaaaaaggtttactttttgatgatgctgatggctggaaagttcaatattgggcatctgcctctgatgggggcctcagtctgcttctactcgtgggggaaggtgaaagagacactgcatgttgagagatcacatggtgagagaagaagcaaggtcggggaggggggtgcacccagactctttttaacaactggttctcatgggacctgataaagaaggaacttatccccaagggagggcattaatcttttcatgacccaaacagcttccattaggctccacctccaatattggggttcaaatttcaacatgaggtttggaggggacacacatccttgcttggatggacagacagccaaatcatatcaaccttgtttgattattgatgattttgcagctgtgatagtttcagtagaaaagagaggcaaaagcaaagattacaagggttaaggagtgaagtctggggaggaaatagggtcatcaggcgccaattacttttttaaaaagttcccagtaagaagagatagaaaataaaattactttttcataggggttgaaaaatctctttgtgatttgccctggtcaaaaaagagttaatggtataaatgcacagtaatttcagaagcattaaagagcatgtttccatggaaacatcaacctacagagggagagaaagagctaggatcccctgacaaagaaggaacagcagagttctagcccccacacagtacagcagggagagatgattacacgtttctttcagcttcccagtgaagatgcaattggggttcatggtgctgtcctcttgaggatgagaaaagaaggaaatggggtttggtttgaagaaactcttggcctcatcttgcttgaaattctgactcaagggtcaatctcattttagaatattggaaaagatcaatggatatctttaactaaatacataaataaatttgatcttccccaacctctttattctaacctggtctagaaacagtgccataatgtactgcgttagagtgaaacttaaagaaactctagaaatataagatgtgggtttgactgataacttttgaccagcacttttgcattgtggtttttctcatctagatgtattttctttgattatgtacacatttggcttcacagttttcagatccataatatccctttcactgccatctagtacaaatttcctgtacccttaaaaccaaccctactgttagagactgttcatctcactgaactgtagcccagaaagctgttctccagaatgtgctacaggaaccacgttaacaaactccttattgcaaacaaatcttcctgtcagttcactttctccattcccagattatattccactttgcatctctctcattactctggtctttccttgggagaaatgatttcgttccctatgtgaaaggattttatctgtatggtaggtgtggtttatgactgggttttctgaagtcagagatatgtttttgaatgagtcaacagcttccaccactctctctgtctcacatacatagcatgacatgcctgtctcccctaaagacataatcttcacccaggcatcttgagtcttctctctgttggaaatgtccccttgaccctggaagatcctccctcctttgaccctctcctcctcccaattcaacataatcacttctataaatcttcacttgaagaactctgccaaccattactggaaaactaaattataaccttctttttccatgagtgacaattcttcataacttccactctccagccctgtaagtgaagccatcaccaactcatcatatattcatctaccattttgccccctttggcagagctgttagagggaattgtgaagtcaaaaatatggtagctacagatggggcaggaactgtgtgtatggagatatttcctgtgtgttgattttgttgaccacccaatgtgtaagaggaagtagagagaggctacagaaaggacaaattgaggaaatggagaaagatcaaaagggagagaaaagccttcttattcttttccgttgatatcatacctaggtcactttaggttcttacccaagggcttcttgagtacatatgctcagtaggccttgagtacattctttcagtaggcctgaaagttcacaggaaggaaagtcttcctgccatagttgaatgtcctagagaaatctttgccagtcattgtttacatagcccctgaatagtttttccagcctgtgagctaaaatggatgtcagaaagacaagccttcaccttaaaattattaatagtcacaaaaaagagataacgtagtcagtgatcagctagcctttgatctgccttggtattttctctgggaaggtctcaccacttagttttgatagcctacctactctgggctgcattccaacatactgaacacctaatctctggaagaagaaaggaattttattcagtgttttaagaaagtgattttaacttatatacagcatggaaatatgaactaaaaggaaaaataatccagtgacagtaacattatgcagaaaagctacttggtttcttctctctggggatttctacctttctagcattgtctaataagtctggctttcctgtagcaccttaccaggtctcacctatagtagaggtgactaagagtcgtgagcatgagcacaaagaggaatttcatttttcatcactgagttctgtgcgtagagctaaatgagaagcaactttggtattctgcacatttgattaattggcatcaaaaggcagcctcactagttccctaaggaagtgtggtaccttcacacataatcaagaatgtgttctctccaaagggattttaaagagaattacatagtgttcaaagcagggatctgggaggtcagaagggggatcattttgaggaatcatttattctagactaaaattatggaggtatgagcacatcttttgccttccttggaaagtgaactttatattgaagtggtatgatttagtgactgcccactgcaaaaaaacctcacaggggtaactaatcatagtaagaacaaaacaaatattcccaagccttaatagttttggatgttataggaatgagagagaatatactgaactggtagtattatggaaaaacagagatccaggaattaggagacccagactcaactaaatgggccaaagcatgacatcattgtcccaagcttcagagtgttcagctctaaatatgaacagttagactgtgatccaaaagtcccttcaaatgctaactcccctgacacccaggcaatgtaaaaaataggtaataataataacaactaatacataatgcttactctgtgatagggagaattctaagtcctttatatatgttgagagcttgtttggaggttctagaatggaagcccagctactcacatacccttgaccgaagaccggtcctcctttattgggaatggtcatcctcttccactgagcctgcagcttagggacggatgcacatggagtagtgagggaggaaggggacacccgcctagccagccagatcagctgaatcaaccctggcaatcgatggagtgacagatgccgcagccagatcaccctcacatcccctttatatatatcgaaacacaacaatcctatgagataggtaatattattatttatattttttatggtgaagaaaataaggaaagagaggttaaataacttgcaagaccacacagcttcagaactggtgggtgcaggatttgaatggagactgtgactattacactgtttaagaactgtgcccttgttcttaaacacctcgctacactgcctgttgcagtatgagtgtgtacgtgtgttatatacactgtattctttccctctttagttactgtttctcccctttattttctttctattcacctctcaccactaagcattttggggcattgtccagatttttttcattcatttgaatgagaatatcttactaatgagaatgagttcctccatttcatcccagatggacccgtaggtaagtctagagagcattgttccctagccatggcctgccacattgaccctgcttggtgaaaggtggcatagataggaggttatcacagctggtgacagaactccttaaaattctcattgctttgataattggccaaagacagcatctttctggagggaggttaatgttctctaccttcttatatcagtcctcctctgttttctttcattgcagattaaactaattcatggtattcagttgtgaaacagaatccaggtaatagctctctgaaattttttattgttaggccaagggggctgaaagcactttttcttcataatagatggtgaatttacacattgccacttacacctctcatgaattcagttcagcccaaactactaaggggctaaagcacatttctcaccaccagtaggagataagaggtatattaaatttgtatcaatcactgttcaagatactttaatatctcattaacttaacaccactaatttagaatttaagatactttaatatatctcattaacttaacaccactaatttagaatttaaataactgtgatatgaactagcccaaacttgaacattttatgatttgtgaagaatggtttgcaaaataaattaatggtataaacaccatttcagagaaaatgtgttatccactggaagacaaactatttttaacccatctcaagtaaacataaactaatattacagtctgctctttaaattagttattcctgagcttctctacaaggtatcattttgcctaaaagaacagcttaggaaactggcatttctaattatattgtccaaccacagagtttaatatttttatatatgacatatctcaaaggaatcatttaaaacttcttcaaatccttcttccttaaaaagaggacattgttgaccagattgtaataatcttgcctgccatgttgaccacgctaaactggattaatcattttggatttattttgataattatgaatttcttagctgggaaaaattcagaaatttctgtttagtctatctaaactagaacactgaaaatctaatttttaaatatctttgcctcttttctccaataccagtctgtaattaggtagcttttaaaagttttaagtccactatttctaatcctttgggaaattgtttctactatttctagaggtactgtgtataaataatcataatttctaaaaagaaactctagtctttcaaaagaattgtgttttttccattcacatggtagagagtaataacagcagctaataataacagaattatagcaatattactaagaacagtattaatcagatgaaatgtgaggtgataagttaatttgcttcactagagtaatcttttttactatctatatgtatcccataaaatcatgttggataccttacatatacacactaaaaactatgtttaaaaaagaagaaaagaaatgtagagataaacaacaggtcaaaggatcctccctgtagcttctcacaccagacaagtaagatggtatgaaccacctgttttatagatgaggaagctgaaggctttagaaggtgacacatgcatgatacaaagttacagagttacagcttttcagagccagaaaattgcaaaaaaagagggggtcaagaatttgtcccttgcctggaactgtgttcttttatcactttacttttaatagctagagaaggaaaatgagagatatgaaaaaccgccactttttaaaagcatggtggcacatggaaagaacaccggactaggggttaggacacctgggtcctattctcagccttgtcatctaatcacaaaagccctgctgggctttgtctgtttcatctgaagatgaaaagattggatgaaatgagatgctatctcttctctgattgacacattagcagatattaattttaaaaatctagtgcttgtaaagacatgcggggtaaagtaagtactgtagttctagggctgttggttggctgggaaaattctggtagagctccttcgagtgcctcccactcaaggtatgccgctaaatcattgctgtgggtatcaacgtggtgcagtagatgagcttggagtggcatggccagagtcagagaggcagaagggctctttaaccttagcctgatcccattaagctcactgtggtgtgactttggccatataaagcaaatgtattggctctgagcccatcaggattctgaggctctttctcaacaagcaggcaagcaggtagattaatcatctaagatagattttgttttatgcagtctgtattagggatctatatagtccaggatgtgccatgtgattcaagaatgctaaaatgcacatctggagctctgtggaactgattttacttcacttggtgatcatggaaggaccctgagctgagagtcagaagacttaagctccagtcctgaacaggcaggtcaccttggcaaagttgttttgcatcttgggacctattttctcctctctaaaatgaaggttctctatggataatttctaagttctctcctagttttagcaatgtgagattctgtgtaatattagaactatatgaggcagaccatctggtttcttaaggttcaaactacattctagagacaaatcaagcaatttaaaatacacacacacacacacacacacacacacacacacacacacacacacacaaccttgatgggacttccaggggatttgagtctcatgggcagaacttctgcatttggctgccacttgaagcaaagctttttgactgtgtacttgaggatgacatgtttggagagaaatagaatagctatggcatctcttaattataatttaatcctttacccaggattcacacatgaacgtttcgaggttctaattaatattaaaaatcgacaaagtacagccagatccaagggtagttggatattttcaggtcttatggaaagttaaattgattaatatagccatttgatctagtttagcctccatatgtagaagccaatctccatttttcagatgtatttcattgataattgagtcttgttaaaatgtggttatcacacttattcactgaggtttaaaatcaagcaactttcttgcctttagactctcaaattatgctaatatattctttttctgaatttttcctattaaataaccttatatttgtatcatattttatatagttttcctatccactctttcatttggtcatcacaacagacttctctgataagctggaagtaaaatgatgtctccattttagagaagaataactgagattcaggtgccaagatcacatgtctagaagtgaccacacccccaattattttttcacacttttcattaccagtgaatggatgggtttgttctgctattcaaagggcatcttgctcaaggctgatgtatatttgcatgctcctcagtaatggctaaatgttctcacaccacaagaaattactcatgaaaacacagtgtgaatgattaatctatatgctgctgacagatatgaatgatgaaaggatactttggagaagaatattttgtatattgtcataaaattttactaatgtttttgataagtgtaaaatatgtgaggagtgcttaggtagataaaatgaacttagagctggaagaggaggagcaccccagaaagagaacaatttctaaggaaaatcagaaggcgctggaacaggaatagccagaaaaatttacagaccaattacattgctcatgagtgtgatttattttctgcaagttcaaatttctcaacttgtacacctaattcaatgctgtccccttcaaagaagtcatcttgagaggctatatagttattccattgatgttgcttattaattgaattatttttggaacttctcttttgtaattgccttctgaaatagatactttcctttaaatattcttaatggtgttttagctaaaggcagaattattcagcacagtgtctgataacaaggtggatgcttacaccagataatttatttccctcctatccttcttcttccttacccctctctcctccatctctctcttccttcctccttttcctctctttctttccttcctctttccttttcttcctttttccttctttccttcctctttccttttcttcctttttccttctttccttcctcctttcaaaatagatgagaccaaattgttttacatgtctcataaactttatttgaagactccagaaattgttcagggtctttgtagtaagaatacattttcaagtatattatattagtgcttatattctagtttgttggtttaaaatatcctgtctcatggttttgtaattatattctatgcaatgaattcttcagggcctttggttggagtgttagagtcattgcaaactataagagacctgaatattaccttcacactaatgatgggcttgggtgagccgctctgggctgagagctgaggaacagggcaagaagtggagcagattgagcattgagttgtgttggggatgctacatgtcactgagtggaggtgtctggagagagcagccaaggtgggatggtagaaaacacgaagccatggcatatgaggaatatgtaaaggccttgggatgctaagtctgatgttgtatatgagaatcaggctggtgtcaggaaaggacatgaaactggagatattgcttaaaatgttacttctgctcccaattagctgtgtaacggtcatactggacccttgttgactccaatagcgatggcaccatatctgaaaggcctaagaagagacccagagataatgaatgagacataggatttactggggaaacttacatacaaggacaatccagtggtggtgggctggacaggagaactgctaccatttgtaaaatgcatgcagtttatatagcattttcacttagcaatgttcacctaaacgttcatttaacccaaaacaaagggctctgattccctgtatggcctgcattccagcagatgaactgggggtttagatgtccttcatagataaaaagtgaatctctgggttggctattccaagatttcttagcttaggactctgaacatttttcttagacagtagggtcattctcagggtatgcataagttattgctgtcaggtgcatctgccatacaataacattggaaaataatttaacctccttgtgcttgttttttaatccatcaagttaaaattacggaactaaaagagtttaacaggtctttaaagagtaaaattgatttcataagggatgtatgataaatgtcttcaaatacttgagaaactctcatgtagaagaaggattagactaagactgtagaatctctaaagaggaaacatgtatcaaagggttgcaggggaggaggtttcagctttaagtaagaaagaactaagtagccaacaccgagatgcctaccttgagcccagaaggtgccattaaaagttccccatcagtgaaagaattcaagaagagctaagaagaccaatattatgatatagaagggaagcataaactgtaagaagtggtaggctagttgattgtgaaaatctctttcaattctaagattctaggaatcgctactcctttgggatcttctgtgttcttgattgcatttgtgaagctacacaggaccagggaatgacaggcttaaacatcccaggtagttctggaaatgagaagtgatccatgagggtttgattcatgctgcataagcatcattagaatcaccagaagaatatgcatcctagcaacctggttgtttaacctaatgttacctggaagaatcaaagaagacctcccagtttcattgaatgagaggagttaaaaaaagagtcttcaagctgcctcctttagcatcctcactgcagttacaagataccccttttgcttcttagcagggacatggtctcacaagaaacattaagcccaaggctccagagtaacatgtcatatgaacacagagctaatcattattgattccttgggccattatggtaaaaagacattaattaccatcagtgcagttgcactaatgcagttgtaatgagcatgcctttgggaattcccagtgaagggactgctcatcagatgacagcagccagaggggaaaagggtgggctgaggtgaaggtgtccgggaggaagacagtttcattggtctgactctagttacctccagagtttctgctaatctatgcacaagtaaccagagcactctgtgaaatccctttcccaccttttcccattccttagtattttctgttccctatacatagtgtaatagccctgatttccagatgcatcctgtcatatcagatccctgcttactgtactcatctcacaactcttagaagtatgggcttggcaagaccttagcaagagttaaagagtatgtgcatatctctgggatagagggagactctaggctcctacatgccacctctgttagcagaaagttgtcttggtacactcctactttcatttcttatctccaccacttccaacctttaatccacctttgttttttgatagcaattgttagcacttaatgagactctactatgcaccaggccgcatggtaagtggttaacctaagttatcccctttaagccttacaaacctaatgaagtaggtccctttattaacctagttttcactgatagggaaaaacacagaggctcaaaaaggctgagtaatttgctcaaagtcatacctctaggctgaacttaaaccaaacacctttttaaaaatttttatttttaattttaagttctggggtacatgtgcaggatgtgcaggttcattttataggtaaacttgtgacatggtgatttgctgcacctatcaacccatcacctaaatattaagcccagcatgcatttgctgtttttcctgatgctctccctctccccacttccctgcctacaggccccagtgtgtcttgttcccctccctgtgtctatgtgttcacattgttcagctcccacttgtaagtgagaacatgcggtgaccaaacatcttttatttaaaatttttatattactttttcatgtgattcctactatgtgaaaacttggatgactctattgcataatcaaatgcgagttcaagaagtaccaaatttgataatggtatctgtatttctatttacttgtctgtctccagccagctttctctctatatacctgactgccttgttcatggtataccctcttcatacttttaatcttccttttattttatctttacaggtatctgatcaatgtcacttttgaggggaggaatttgtccttcagtgaagatggctaccagatgcacccgaaactggtgataattcttctgaacaaggagaggaagtgggaaagggtaagacatgtctttgacaattcttgagcaaagtagagtagaaatgtgaaattttgcaacacaatgaaggaaagtagtcctttggcttttgtccctagacctgtggagcaagggatcaataccttgatacacaggagaagccatttctcaaacttgcatgttcatttacttgctattttggttaatcaagggattgttttctttgtgtattaccatttattgttgataattgcattgctgtctgaatcttgactttgtttttgtgggagagtatgtgtgtacaatataacataatttggtgaagaaactgaattagtggtatagttcaggagttgtgtcctagagagcatctgggaagcttataaagatgaatttatgagaagaaaggtttagacttattgtgattgaaggattcccatgcaaggctctgctcaatctctcccactgccagttgatcacagtgtttgaaattctaccatcagaaattaatttctgtgggcaccagactgtctaggtccaattcccagctctatgtaggatcttagacaaatctcttcactacttgatgcctcagttttctcatctagagaaggaaaataataataatagtaccaacaggtataaggatgaagtatacgtaaagtatttagaaagttgcctggttcatagtaagcactcaattagtattacaattttttattattccagattcccagttgaatacaagtattcctgagagtaatgtcatcactgatttttctccaaatatgttctgcagtgctcttgtctctcaagacattttgctgaaaaatagctttacagatacataaggttgggagatgctacctactgtttctcactctaggagagtcttggaacatactaacccttggaagttcagaggtgtcttatagcaaagaaacatctttacttttatttagaatggaatttcctaaaattattctaccttgagacccctttgttcatgatattcatattctgtgaaaacatgttgggaaactgatttaagacaacttccacagattccatggaccaattggctgagaatgggcttcaaaatgttagcatagttctgcctagaatggaaatccagctatatatttctagagagagttaccagaaaatgaggccagagataaacttcttgaaattcacaacctcatcacagagagccctggacagctagttatgtgaatgtgtgaatgctcacccgagaaactaggcatgtgtggctcaggcagtagaatccaggatctaattcttcaagttgaaagacctcaatctatcatgcattttctcttgtcagatagggcacaattataaggcttaaattatgccagctttttatttaatcttattcttttgagacagggtctcattctgtcactcagactagagtgcagtggtgctgtcatagctcactgcaacctcaaaatcctgggctcaacctgtccttccagctcagcctcccaagtagctgggactataggtgtgtatcaccatgcctggccaactttcaaatttttggtagaaatgaggtctcactatgttgcccaggctggtcttgaactcctggcctcaagtgatccttctgcctcagcctcccaaagcactggaattacaggtgtgtgccactgcgcttggcctgcctgatgttcttgattaaagttgccctccctccactgagttatcatttgttcagaaatggttgttccctgggcttctgcttttcactacaatcaagctgctttcactgctgctgtagagatgtcataatttaagaaatgttctgggttcttcatgtataacaggcacttctgtctgtctctagaagaggaactattaataactgaggcttcataggtagctcataagatgtacagagggggcagctttctttgcagtaggctcacaattactgtctcaagcaggaggaggcatctcacaacagccttttcttaaagagacaccactcaccatcaggtcatattgactcctcttcttgagtccagaatctgaggcctgcatcccctacccctttctagaactagaccctacttcctagggtttggatcccttccctcaccaattctatttttattctagctcttgaatttattctttactttatatatgatccagggactatgtgacaattttttaaatgggcctccttgtccctggtacctgcctttactccttcagattagtccaaaatatggctgccagaatgagcttcctgaagcacaattctgactgtgatgttccttctctgcccaaagccaacttgagccttctatggtttatggactggggctagacttgatctgttcttgcattcaaggctctggtctgccttccaagcctttattctcctcctcatgatttcctgtctcacaattaagctaccctgggcttcttcttgttctgagaatgtgcctttgtaggtcccgtcccctgtacatgtcatgatgtgtcttcctagaatgaattatccaattatataatcataaccatcctttgaaacccaattaaaatgttgcagcttcctcccctcatctttgactgagataaaatctcacactcccttgtcccctatagattttgtccatacgtctgtggtagcacccatcacatctgcctcttgttagagttgtccatatgcaagcttccaaagggcagaggctgtgtctttagctcaattgtgtcctcacagcaacctgtaagggcgtatttcatagagcagttcaataaatatttgtagcatgtatgagaatcattacataataaaagaatcccaaaatctaccattaagaatccaagtttatgttgttgcccttgatacggtagctgttgtttcatggggaggggcaggagaaaatatttgtgtagattgaatttttgtagatcatactttacatgtactaaaggaagttgctgtttaaaggaattctgtggttaatctttttgtagggcatttgggaggggttgagataatagaatagaacattttcatatcgactcaattaacccagggaacactttggaagatagatgtctagtgttcattgaggtcatagagccatgtagctccccaacttgaaggcttctattagggctcacctgtgggcagggaggatggcaggagccaggtgtggctccagggaatggctgggttgtggtgagattgcatcatggaaagttgtattggtccttccactgttatcctcgtccccaggacatcatcctcaagacgcctaatgctgcttcagaaagtccccttggtccagggaggatttagtgtcagtggactccagggaggcaggcaccagggtgaagattctacagggaggatttgaacactggacagataagcaggggaggaatgtgggtttgtggaagaaatatgggctacagataggactgtcagccactggtcaggccactaactagccataggacctgcttttttcacttttctacatttttcttttctcatctctaaaatgatggcatgggactaagaagacttcttgggtcctttctagtgctaacttctgggactgcaaaatctccttgcaaataaatagcagattggaaaagaaattgggtgagggatggaacacacaggaacctgagcttgttttgaagggcatagctcctaggacatatttgtcattcctgtcatttaagtaaatatttctccagaaaggccctcctaatgacccatgatgaggtagtcaccccgtcacactgtctaacagtagattttaattttcctgaatacactcattatctggcgttttgcttacttgcttgcttgtttgtttattgcctgcctcttcacaccaggatggatgcttcctgggggcaaggaccttgctcacctctgtaattctgacccttcagaagagtgcttgccttcagtgtctggaccactcaaaagataattgctaaataaatgaagaatctgtatgcttaggagaactagaatattgacaagctatttcacttctaccctgaaaatctcccatttagacatagaagtttactggagacagcatgggaacaggtaacttcccctcctctggagtgagcaccccagtgccagggaaggacttggggggaattgtcagggaggcccaactcccagtggagtcatacatgtgtgaccagcttttaacaaggcatctcgggtcaaggaagattaagttgttggtgtgaaccatgtgatacgacttcccaatgttcctttaggttcctaaaagtagtcccaatgctacagtcttacacattttgttcccttgggaagacttgaagtcaacacaacatagtctgtggttttggaaatcagaactgagttcagttctccatgttgccatttatcagctagtgatggatactacctgagtttgtaacatagggttttacataaggctgttgtaaagattcaaagaggttttacagtcaaacatcagtgaatagtcactgaaacagtcagtctccaacaaatgtcaattggtagtcaatacccttcttgtgtaatttttaaggtaatatttgcacatggtaaaaaatcaaatggcacaaaagagtatccagtaaaaagaaagtcctcttctcatctatgaccctttgcttccctctccagagcaatgctgttcccagtctctggaatcctccccagagcaattgttattgccaatttcttatgtactcctctgaaaatactccaaacatttacagatttgatacatttacccaactactttaataaaaaaatgaacagtatctgctcttgtgaacctttaatgggatcctatgtaaggaacctcttggaggcttagggggctagaatagcaaagagatctctggatcagaatttgattcacagaaagccaagaacatctccctggtatgtaggaatgtggagaaggacatttaaaaagaaatattttacacacacatatgcatgcagacatagcatggtgagttggaaagggtagaaatggtgaaaaaaaaaatcattgtgtgcagactgggctcatttgtaaggctcctaagtgggggacagctgcataaacttgctttaaaaatagtctggcacagagatgcagttccaacaagctttaaggcttctgtctctatcagagcctctcatgatttgcttcattgctactgctctctgcttccatttaatcgttcctaaaatggtgataataaaaatgaaatgcagtgggggtgtgctctgagtaatgacttcaagaaatgatgatggtgcatttttgggctctgagatgtaaacagaccttaaagggactgtctgggtcagaattaaaggagaatatgtaagatttgcatctctgcttatctttttcagaaagagacaagagggtgttttataagcccactccctcttccctgcctccacctaccagaaaactcccttccttatgtagattaaaaacattttcagtttgtgtagatcgttctctggactccccaaacctgtttccatctatggctttcaactctgagatgtcacagccacatccaccagtaaaggagagactagaaatgaaagtgcatggcacacagttttgaacccatgatagtactcaggaattaatggatggatcaactggagggaaggagtgcaaccaaaccgagaaaagggagacccccacaagagctgaagcaatgaaaatgtagtaaaacagaatgctctgccagtatctgcagcctggaataaataagacaggctaagggacgctgtgtctctggtgacctcatgtccaggaggtagcaccaactccagggtgtgggggctctgtgatcctagcccctaaggactatggtgatcatagtccacaatgatcaaatcagtgtttatacaatagaggtcaatcactacctctattgatattacttgaaagcttttgactggcaaaataaaacagctcctccatccccgctcatacatattcactcactcagaagaaactggcacatctgtgtgcctctccactatacctctgtgcctagcatggtgtgagacatcactgagcaggccagtaagtgcagtgttggtgactgcttgggcacagctggacagactttgttccacctcccagcctcagaggagaggccaggggatattcatgctctctccaggctctacagaaggcatctaagggggtgaaacagaagctcctcatggcaagcgtgtttattcaggatctcctgataccaccgtttgacaacatgctatttttactgactttgaactgagtactaatatgcatcattggattaagggattagaagacaggatccatggagaaaggctatgggaattggggttgttaagggaaagaaaaaaaaggcaatgaggtgatgacttattctctttaaatgtgtgaagaataattgtaccaagtgtggagatcagctgttcactttctcctctgagacacaaccagagtgagtgggcttaagatcaagcagagagggtttatattagctaaagggagaatttcttaacagagagaagtgttgagtactggaactgttaacaacaccaggggatgactttgaaagtcctcaaaattgtatatgtccttgtctctctgtaatgtacagtcccgtgcaagcaacaatgcgtgaactaaatggcttatcctccctatctccccacctcccctccctcccctccccacctcccctccattccctctccacctcctctccctccccttccaaccgcccctctcttcctttttacttctccttctttctctttccttttccttcttcattccttctttccttctcacacataattattaagcacctatcatgagccaaggactgcccccacaaatttgtatcatagctttcctggtggctgggaaaaacaaaacaagtacattgcaataaaaaaagtgcttgttgtgatgtttaacatttctataaactaaggtgatttttaaatcttactatttgataccatctaacattgggttgatgttcattagtaaagactccattaatgtgtgttttacttacgacaatgacacggggccactggattacatattttgttgtgtttttctgagttgtgattagtgcagaccctcacatccagatgtttccttgttcactgagctccaagagccctggcccatcctgtttgactacaccattctccagggttccagaaagagattacaggaggcagccatggagaggaggaggtagaggtgtgctgttaatccctaaagtctcaacactgctgtaggctcagtccaaaatgtcaagctgctactcccatgcacatttatgaaataattcaaagagaagagcaggatgtattgggggaatagactttggaatatcatttcagaaaggctggttgccttccagtgcttgtcaacagccactgaatgaaaaggataaaagaacaagataaccttggttgactttacttttgaaacctgtacatgctgatggacagagaaagcagaattgaattcagagactgaagaagtgctggcctaaccttggcttcaggaaaaacagtgaaaaggaaagtgttcccaaagccaaaagatggctttcatccatctcatttaaatgttattgagatttttgtttcatgacagttatctgtggtttgtccctgagtcctctaaacaattttttctaatttttattttacaatgcttttccagtactggtgttgaagaagaaagagtggtagagagatgagaaaattctatgtttatatctaggttaaaaacaacatttatgattttcttattatgtaggtaattaatgtttattaaagacatttgaagggataaaataaaatttacccatatctgcacctacaaagaattagcagttatattttaaaatttctttccagtgttttttttctgtgcattctgtgtgtacactgtaatacaatacagaataatacaacagaattggcatcttaatgtatggataatttgcaatctacttttttctcttcctaggatattgaggacatgttccctttttattaaatgtttttcaaaagcatgaaacttaatgccgaatattacactgtgagaatataacatgcttcttcaaactggttccctatgattagacattcatatgcatgttaaatagaaactctggttctcatatgaaaataatttcagagttggtggtctaactgtgatgccataagattgctttttaaagtgagaagatttgtccccttttttttgtatccaatgtccctaaatgttaaaaatgaaaacccttaatttgggaattggtttgtttatatcgattctggaacaatcaggggacacatatgcagtctggtggaaggctgtcctttgttatttcgggtctgctaggagtcccagagggttttctctttttgatcttctcatacagtgcgctgccttctaactttgttgagatatgtatttcttatctttggtagttacatcacagagaatggggttgtccatgtgttccatgtctgtctgcatttttcatcatgttggtttcattttcttgaaagttgagggcttgtaaaattcagactcacgttcccaaggagtcatatgactactgctcagtatgagaccctttccagcgctgtttctattctgtggttcatacatgacccagaagggagagagcaatgcccttctttcaccagtagggatagaacatacctgacttgctgctatagcagtatattataaaaatacctttacatatttttcaccaaacaagctactttgtgcctatattaatagcatattgactttagctaagacctgaagtttggcattaaagctaaaatacctgattgtccttcatatgcaaacatgcctttattgatctagcacccgaagatcttatgcgttgagtttttcctgcagtgatgatggatttgtaccagccatgcacaggctgtatctccacaatacctatttatgagagctggccagaaacagggtagaaataattcatgtatacaggaagagaagctctgaccttggcatgttaactctgccaagcagcctgtggtacaaacattttaaaggaagtaatagccaacaacaacaaaaaaataaaatttaaaaataataaaagctcttaataaaaaccatgaacataaatttcccacagcagccatagcattcagattattcagggtgattttataattttctctgttagggttatttctgctcataatttggtgaaccttttagtttatcctgacagagatgtcttaaggtggcttgcttaggagcttttctactttccttccaccctccctctctcttctgtggccaggtgtccttcgctgtcatagaggtggcccattgctggttttacaggcgttccaggtcttagttctgtcagctagctgttctgaaggtttaaacttaaagcaaatctgtgccaggggaatggtgagaaagaaagtatgaccctggaaggagaagagtgcacatagaaggcagtcactggggagggagtgatggacctcgaggggaaagaagcccgtgctccactgccctattctccaggtgcacaccacattcctgctcacaccaaacttctggtggatgcctttccatgtttttctagctcaagcgtttgctgtcagatgtcttctgaggtcatcatctttgactcttcctgaaataatatgtactcgtttttcttcattcatcccataggaaaggaagtttgctggcaaaggaacagaatattccctttgaggtaaaattcatagtgaatatttaaggcacctcagcattctctttatagaaaagtgaacacaaaattccattttccctataggatctgggaaagacatataaatgatcagacagtctagcctggaattaagggacattaggaagatttggccatgaatacatctgacttttatgtaacatgttattagcaatgttattaatggacaaatttagcatatatgatcccattttgattcctattaaaatgttgagaaatacttgtacatgtaagtaaattgaggatcagaggtcacatgattttcccaaagtcacatagctaaggagtggcagagctgggtgtagacatttacatctagctccgtttgtgtccagtgtgctttttgcctcaatacatggagtataagagtacaactagactaatgggatccaaatgtagcaatgtcaatggggataaattcatagacaagaggacaagtcacactatagaaatgtgcagaccctgctacttgagttttaaaactacgtgttaagaaatggtccagcatctggggtggagctggaggtgtggaggctggttagcccagactgtgactggctatttcagtgtaacatttttctgtgattagcaaaaatagaaggaagaaaggaaggaaaggagagagggaaagaaagataaaggggggagaaagctttcttgtatctttctatacttataattcctgttatcacacacacacacacacacacacaaacacacacacacacacacaaacacacacacaccctctcttttcagttaggaactcagaacctatctcctcaaactgtgaggaaagaacatgtttctttgaattacaaaggccataactacctacagaaacagctgtctaggtcctcattgcatggaagggattttcgaggaaatagtcatcttctgaattaaaagcttttctaaaatcaaccatcatggcagtggcaccgtatccctgcagccccattgatcagacatctgttggaggtgcagagaaatgtcaaaacactgaggggaatttaaaatagctgacctacaaaaacagctcttaaaccttagtgggacagtaacatgaaaatttaactgctttatttgaaacacaagcaaccaaatattttatgaactcaactagctaagggagaggagttttgagatcttacataaaatgagataaattaaactcaattaagttaaaaaaaagtataagaaagaaaaagtaggaataaaattcaacaataagaacactgatcttcaaattcatcattgctgcatcagtgtttcctcacatgtggctgtgaatttcaactgtagtatttgagttaattcagaagggatgagtatttttttgtttaaataatcatctatttttatagttatcttctacttttgggaagtggcacaacttacatttatagtaatgatacgaattttttgatacatatattcttaaagattatttcaaaaattagtataggtggtatacagatgtggcaaaattgttacagtactacttgaatgaatgaaatttgggaaacatttccacagggcaaagtgttcttctcccccaccccagccccaaaatcatggtgtttgaggttgacccaccttcccttccttttccctcctcacctctctgcattcagcctccatgcccaataattgcaactaactattctccagcacctcttgtgcttttatgccttaagccctgtcttatgcttttctcttgaccttggattcttgaacttgtcttttgacacacagttcaaaaaccaagagaaaccatattttggtcacctctgcccagtgcagtgatttatctaaataaatttaaataaatattattccccctttctgtgcctttgtttcttcatctgtaaaatggggattataatagcacctacctcaaactgtaaagttttaattttgttaaaactaaaattataattcatgtaaaattcttagcacaatatctgacatgtagcaagtgctactctcgtgttcactatcattttacttgaacacattttaaaccaatgataatacaaatgaaattagattctagaaaacaggaaaatggaaaaattgaccatacttaactacacaaagacacacacaaactagttgggttttggccttagtcactaacaggaagaaactagaaaacagtatatagatttttgatgtgcctagttataaatttgaaatgagcaagcttttttccttcattctaaaatgactttttgcacagggatttttaaaaggtgagtcttaattaataataaaatactgacaaagtctacagcatagcacagcagcccatgctgggcctatcactcagaaatcaggcaattagaaacccctcagttttgatatagcacattgtgggttctcagtaaccattaaattacaaccaaaacacattaagcaataatcacagtttatgaaaccttatagtgtgtccttgtgctatttgatctacttgggtgttgtttcactgtaataaaccaccatgttgtggttgatcttaaagaattgccaattttccctttatgtcttccttattctgcagcagatagattagctcataaccattaaaaaaaattccttctgcaagggaaagtggtttaatgtcaaaagacatgcccatagtcatggttagtcatagttgaacataaaggggatggcggtgaaatggtaggtgaggggagtggtgaatggtcttaacaacagacaactgaatagcgtttcacagtttacatcagaggttctcaaagtgtggcccctggaccaacagcattagcatcaccggggaacctactagaagtacagattctcagcttctacaccagaagctctagggatgaggcccagtaatctgagttttgacctataaaacataagggccgctgatcacagacatttccttttcacaaggagaagtatctgcttaatagatatttaaggctgccactctgtcattgttctctgttctcattttattttccagccattaattttataataaaactgaatctttatcctttcataaagtggaggacagagccagtagcccagtaagaaaaagttaaagcctgccctactcactccagaagattcttaattacctgatatcttcatgtagttgctcaagacattccctgacacgaggccgattgggtttatgcatttggcgaatattttcccgagcccctactaagggctgggcactattctaggtgctggggaaacagtattgaacaagaccaacaagttcccttcctcaaggagcctgtgtcttggtgagtggggccagacaacaaacatataaacaaatcaatacatatgatcatttcagatagtgccatatacgcttaaggtggtaagacagggtgcagtggctgtcagactcttaaggccagtctcaaaggggcttttgatagatttatcattttaaataagttgctagttaaatttcttcagagtatgttcagcagctgtcataagaaatttcactagcaacttatgtaagaactttccaaattatgtccacaagtcctctgcctaaattgtatacagattctgtgttgaggctacaggcccactttgaggccacaggagaaatatgagtagtattttatctcccatttttttctcgctgctagattttagagaatgggtatggatttatataatctgtcacatcaggctatgaacattacaatatttatgcttgatttttccaaaaaatcaagaagcattaaccttcattgtttaataagaactgcatttagtgagttacctactctagcctactgttctaagtgagcatggcatcttttggctttctttcacagctgttacggaaattacttcacttccttgtctccagttgaccctgtaccatcgaatgtgacacaacatgggacctggtgagggtgtataggaaaggtcataaactggcagtcaacagactacttttgggccatcgacatgttctatacggcctaaaaggtatatttaaagattaaattggtttctaaaatttaaaaattcagattcccatagaactccagattctggatttcctgaaaaatcagaagatgggcaacactgcgttcacattctgcggggccgcctttggttggaatacatgctgtccagttcatctcagccccctgcaagtgtcccacctctttcattaattatctacctagcccctgcagacactggagtttgcaactcctagaacacggatgagttcgaaaaagagtcattccctgcttaaaatctaaaatggataccttagaaatgggtagatttaggattaagggattgggcatttatggagctgacacagccttttgattgctcctgcagtttaccttggagtctctagggggcagctgcgaattctgagcactgccttggaaatgcaagcacacggagcaattacagttctgtgttgcacggaatctccagatgtaccctggaagtgtagaaggcaaaaggcactacttgtctgaagggggttttctgtttgtcagacaatgaaatacagaaatatcgacttttaatgcatttaaaggttttaggcacatgaggagtgtgcatttgtcttttttcttggcagagtaacaaataatcctaactgaaggaacacccggaatggcttcacaggcatgagctttacagagaattggagtgatccaagggcatttacctagcaaagaaaggaaggcttcaacagagaaaaagctcagctagaggactaggagaatgaaggaaaggggctgggtaaatgaaacatgtgaatataggaaaaactgaaattagaaatgaaggcagggccagaatgttgcatcttaaatgtaagaatggaaaactgacagcaattaaaaacagagtgatatagtctaaaagtgtagagagaaagcttgatgattttaagtcatgctatactgattaaactgtggagagagaggaggaaaagcagagtcaagaaaagatgaggttgaagttgtcaaagcagaagagccgtactcaagaggctttgaacagtctggctagaagcgaagggaagttaataatgacaataattacacgtgtatctttatattgtgcaagtgctaaataaggatgcaaaggaagtgcttagtctctttttggcgattttagatcccttcatcccaccccagaagttagaaacacttcatctcagaatggaatttcctaatattcatagaacaacattgaccatatagcatttttctactccacaaagctctagtgaacctcttcttctctgatccccagtggtgtttctgcttttcatgtgaaagcagattctcaaagtccacgagaaggaggcattgcttttgctgcctgtatccagagttagcacttttatcaatcagttagcttcagttcaattcaacaaacctaaactgaagggctcttctatgaaggactctgtgctgggtgctaagaggaaaatataaaggtaaatagacaccctgttctcaagaaatgtacccttttaacagaggggttaagaaaatcacacaggtatgatgcagggaagaatatgatgtggtaggcagccgctaagatgacccccaaagattgtacttcgtgttattcatgcctgtgtgtggtcctctcccccagttatgggctaaatttagcaacttgattatttggaagagaatagtgaagtgatgagatgtcagttttgagatgtgcacatgaaaggactagcttctgtattggggccctctctcttgcatcccttgctctaagggaagccagccacctcgctgtgagcaaccctgcccaagtgacaaggaactgatgtccctgagtagcaacagatgaggactggggcctgcccgctgccatacagccctgtatacagccctgagccacaggacccagctaaagcgtgtctggaagctgaccgacagaaactgtgggataatcaatatttgtgctttataccactaagttttataactttttacacagcaatagataactaataaatgataagacaaaggggcttataaaaagaaattacatatctggttaagggaatcaggaagggttttgagaagaacatgattttattgataggctttaaatgatagggaaggttttagaggtgagtaatattggaagtgaggatgatatttcaggcagagggagtaacaggtgaagtacaatatttgtttattgaataagagtttttttttaaaaaaattgtctaggtgataggtacaaataagggggtagagagacatctttaagtaaagattgagcttaaagagcattagaagcaaagatagtttgaattaactcaagaagcaatcggaagccatgaaatgtttgtgagtgggagagtgatgtgattatgacttctcttcaaaaaattcatccagcagctgtgatggggtgtaggaacttaggtgcctgcaggaatgccgcagtcatcttgggcctgaatgaatgtggacaatcatggagcagaggtggctgcgagagtgatggcagaggtggaataaatctgtaacctactgggaaagatgagacaatgaccactgaagaattgaacttcaggaaatgggacatttatgggacactgggacatcaaaacaaggaacaaaattagtgacggggaagcagtttcatgggttcaattttaggatttctaattctgagttactgttgagtcaggagggaagtagaaatgtcaatttgtggttctggtgtgaagataccactaagaatgcagactgagggatgttctccacggaggggataattgaaggctagtgagaagatgagtttctaacgagaacagaaggagagggaagaggaccaaggacatgggctacaggacatgcctctgggtgggtacagggtaagaggagagagtggaatcagcaaaggaaagggagaagtagtcaccacccaagaggttggtagagccaggacagcctgacagcaaggtgaaggcaggggactttaaggaggagaggaggggatgaagcctgacttctcggtggttctcattcatgcatcattgggaagaaatgcttcacaagaccccaccccatcaaaaacagaccatgccaggcaatcacagaacaatgtagctctgttcttttactcattgtttaaaactcaggcattagggtttttcttgacaatttaaggaatagatggacacaaatatttttacccaaatataaattcttattgttcttcagtgatggatctgtgctcttcaaaatctatgtttttattctccagctgaattattggccgcttaaaagactcttcttaagtgtaagatcctaaagaaggaaaataccttaaaccgtggtcttaaatgtattccatctaattatgaggatctctttttcagaatctgaggaatcctgtttcgttttcatttctcttttatgtaacgatattttgttatttgtgtctgatgtcaaaagtatagcagtcgttcattaaggaaaagttaattagagaagagcatgaagaaaataaaatccaccccaaattcaaccacccagagataatttgtttatattttgatttatatcattttagtccttttatctttatattataaatgtgtgggttggctttttagctttttttttttttagatggagttttgctcttgttgcccaggctggagtgcaatggcacaatctcggctcaccgcaacctcagcctcccgggttcaagtgattctcctgcctcagcctcccgagtagctgggggagtacaggcaggtaccaccacgcccagctaattgtgtatttttagtagagacagggtgtctccatgttggtcaggctggtctcaaactcctgacctcaggtgatccgactgccttggcctcccaaagggctaggattacaggcgtaagccactgtgcccagcctataaatgtgttttataaaaacatgtgggaatatttttataaaattgagatagtattatacatcctgttttataatctataatcacaatatgctgtgaatgatgtcataaatatattaaatcgtataaactaaccatttatctactattaaaatatatgaaatatctaatctctgtccattatctatttagattcatgtatttatcccatgatttttaaatttctgcccctctgtactcccctcttccctgccccccaacacaaggggcaaatcttggtcatagcttattggtctgaacgtgttgtattgatagtaggaagatctggcatttgttggctttgccttctgcatcactcactttttagtgaactgctgaagagcacaccaacaggtgtcagggaacaccaaacacctgcttgtgttggctcttcccatatcgctaacatgaactctgctccttctctaagcaagcactgccctcctgggattcccattgcagctacaaatctgtctcctggtgctttctcttaaatgcctttttaaacatgcttaataatagatgagcacctgggcccttcttcatgaaggggagctctagcagcttttagaacatggaaaagctatttggcccttaaaagctgattcttggaatatccccaattccccaggacaccattcagtaaccacgtgctccaagacaggaagtggttttcctagtgggttttattgctccacttccccttcaccttactttttcaatcctgaagataacttttattgactctttgcagtcagtcagctgactggcagcaaagcaactcccaggcccctctcctgctctccttccctactctggcaatcccatgctgtgtgactcaagcaggacatctgtacttgacttggtgcgattgatccgttttctgagtcctagtatcccagaaagaaatgagtcccttccccttggattatcatgtcttggctttgccatccatctagtgggtgaccttggacaagtcacaaaatgtccctgggcttcggtttccatccatatctataaaacaagagggttggattaaattcttatggtccatctagttcaaacaatctgtagttttaagtacagttttagattttccagtgttctgactatggcgtatttttagtgacatctatttattcattagttataagaatagcttatttttagaacttcatttcttagatggggcagctcagtcacttggttccatggtctttgttaacagctaccttcctgggaaggatgcttggaagggaggttgaatttttccactgtcctctttcttctgcctttttagtaaaatttagtaaaattctcagtaataacaacctagagcagatttcttcagaaccttgcgaccagcgatcagagaaagacctttgactctctttgctttgtgcagttgacttatttgtgtctccttcctggaagaaacgttggtgattcgagtcaggctgaactgcctgcacattggtgtgtcatggttacgtgcacacagaacaccaccagtgttccctaccccactgcaaaacagtctctttttgtttgttcgttttattctgtgatcctagatactgttttacgtgtgaccatttgtctctttctctgtaatcttttccttcaaaattagaaacaatttatagggcacagtgatgctttttttcctttttatattttgaaattattattgtattcaggaactgaatcatatgttcatgctttggttgaccattcattcaacaaatctttaatacgttcctacagtgtgctagattctgttctccaaggaaggagattgaggaagatgagtggagagaactgacaggcagagaagcaagagaacggagagggaaaggtaaagaaaaacactacaggagaagctagaagggagtggaggtggagttttctcaaaagaggtaaggaacagcacagactccatctaaggcagaaggcagaggaaatgaaagtaaggaatcagaaaatttagggagtgtcagccaatccttcttgtaagacaattctctcaagcaactggagccctgattgacagataacaaagtgttagtaatagctaacactataatatgtctacagtatgtcagtatttataggtcaggcactgttctaagcagatcacttacattaactcatacaaatcctcacaacattgctatggagtcaatatttaatatgacaaaaacaaatataggccaacaacatgaggcccagagaggtttagtgactttctgaaggacacagctagtcaatggaagagccaggcgttggaccatgcagtcgaattccagagactatgctgacctcccatgcaccactgaatgtaacacagagaaaggtctggtcccattctcattctattgaggatgcagtggggattaatctgcagtagcttctaagtgtcctaatgcccattttccttctcagtcaattcttaccgctgtaaaattcaagcctcatacttgatgtttgctgacagcaagaatctggccagcatttttgctttagccttaggcatggcttgagtatcatcatgactggttgggctgggtggttctattctgggatgaggtaggttaggagaacaagcttgaaaagatgtggcttttgactcactggttttcttgtacatggaaagaagtataagaattttacggcttttgaatgcctttgggtaatcttgtgctcggtgggttttttggttgaatgttgattctctccaaatgatatgcaactaccaccctactaagtcttaacttctctgggtttctcaaaagtgttacactggcccaactcagggaattactaattcacttcttttactcatagggagaaggctgtggaagactgacatttttcaattccatttcttccgttgaaatattgttttttgttctcctgggttcctgtcctttctaacaggtgtaagcctgtttctcctgcttgtaaaaccttcagtgaagtagccagaacctgagacagaatattatcctcaccctgagagctgttctgaaaccttagaatgggctttgcagaactggaggcaaatctagcttttcctcattgtaattgccattgtaacaggtgaacagagatgccaggacctgagttatctggacaataccacctgagaagagcaaaacacaccagcaggatggccagaactggactttggggcttttagcagtttcatctatgaaagaaaaacagagtcagcactttttgtatacaggaactcagtgaaagtaaattgttggaaacagaaccatttgacgcattggcagccagcagtttgggggagccagtcctaagactgttctgtatatcattgcattggcattaacctgtaaggctattatctgaaggtttaagcagagaccatcagagtcagcaatgggtttcttaaaagatgtgcttcctgtcaagattttcactttggtttttcatatacaaacaagcaaacagaattagttaaccattgttggggtctttcattcttctgtttcctgccacttctcaacatgcacacattttcaaatattttcctagagcttctttgcaaagagcccagggaagcttttctttcccttgccacctcctcccttttcttcctatctggccctgcagtgagcttctcattacacctcttatcataataattccagaaataacatctaccttttctgtcatgcctttcatcggaggattcccattgagccactctagcagtgagggctattcagcagcccacccctggcacagcattcctctgcttttgggtcacagacagaaaatactggaagcataggtacagcctttttggattttgagagtcagaagggagtgcagaaaggaggtagcagagttgcataacatttttttgtgatttttgacaaaaatcagatacttagtcctaagactggctcaacaaatagaaattttagtgtgaaccataggcctgtactgcagaaaagaggaaagatggacaattaatgttaccaattagtggttatagatgaaacatgcctactgaaaatgggtagagatatacttatgtgaaatagtggatgtaaagctgtggtgttaggtgagctcccaccatatacacttgaagagaatgaaagtcgcctactgagttaatattgtactgtgtgcttccattataattgcccttcctaatgccatttgtgatttcttatgtgtaaatttgttaacttactgacatctctctgacatttgatactggggacccctatctccttgcaactcctcctttttttctgtttaagtctctcctttctctgctggctttttttctcactccccctccccttaccttccatctttactcccactctgccttcccttatttattgatgtactccagggtaccgtttttgatcttctcatcttctcagagacccatctacacagacttcatgaaaaatgcctgtctaaaagtaatgcctttcaaatctgcatagcctgatatttctcctgaacccaacttagatgaccaacccccttcttttaagccttaacttttatgtctcacagagaccccaagcccaccaaactcaaaagttaatgccccattttctcccctctctttccaacatgcttctcctcttgtatcgatgttggcatcacaatctacttaactgtccaaggtagaaagctgggacttgctaagtgattcctcttcctcatctatccatctctttgatctaccatctcttctttattttctcttttatcgcctttgtcattgattgcatgaattactgcaatttccttctttccttgactctaatctagcccttttctaatctatccttcacacagtgtcagatggatcctcctaaaacataaaattattcatgtcagttccctgactaaaactctgcaatagtgctccagtgacatcaagatgaaaactcaaagccccgctaaggagcttccatttctattttctttgttaacagctaccttgctgggaaggatagttggaaaggaagttgaatttttccaccgtcttctttcttcagcctttttagtaattctcagtaataacaatctagagcagctttcttcagaatcttgctactgagtgatcagagacagacctttgactctctttgccttatgcagttgaaccatttgtgtctcctttctgaaagagacattggtgattggagttaggccgcctgcccattggtgtgtcttgcttgcctcttccttctctttttccataatttcttaacttatacccatgcataataaattgattatggttctttgaatctaccataccttcctcacctccttgcactgcacatggtttccgctttgtctagaagggccaatattcctcctcctacatcagactgttagcacttggctaactcttcacagttcttgaaggctcagttcaaatgttgccttctctggcaagcttttcctgacttctctgcggcctccattagaaacagattaggtgtttccaaactaaccaacacacttcatccatgcatttattacaccatattgcacttgctcatgtttacttgtacctcttctccagaggatacagagagcctctccacagaggctgcagagaggtcaggaaaagcttgccagagaaggaaacatttgaagtgaaccttcaagagtaatgaagagttagcaaagtgctaaagtctgaggtaggaggaggaaaagtggcccctctagacaaagcagaaaccatgtgtagtgcaaggaggtgaaaagggtatggtagattcagagaaccataatacatttcttatggatgggtataagttccctagagtgggaactgactctttagtctctagattcctagtgcatgatgcagcctagaacacagtaaatgctcattaaatgttaaatggatgaacagatcaaatcctgttctcatttaattctcataactcatcttactggataaatattatcctagttttatagatgaggaaaccaagatctggagaggttagatgactttttcaggattacgcaaatatcaagtcagagaaacgtggatctgttcaaacctcatggacatttcgcatagaccactggactaatttctgtttactggcactagaaaacaacttctgatataggctgttttctagcttagttatgagacaggtagagaagggttcatattaaggagttagggttagagttacactgagtgggaaatatcagcaatggattctaagcccagtaaaatggatggacattatacttgccactatttcacttccagaatttctacaaatgcctataaaatcaacaccagccaatcaatcagctaatattcattgagccaccattttatgctgaatataaaggtagtggtgctattttttgacaaagtttacactgagatatttttctttcccgtctcatctctgtttcttttcccaaaataattaaacttctttctagattcttgtccccactgggttggggacagatgttggaggccccgctgtctacacatggctgctgattaattttattgaccacatgcctggttttaatgcaggacagactccactatcaaagaccattcctgggcccacattgcccttgtcatttcttctcttttctaccataggccatccctgcctgaggtactagaccttgggaagatataaaacatcttaggccttggcttttgagacaatcagatgtattcttgctatctctcttgccccttttcttctagcactggcaggtatgcttcaaattggacttccctctcatttagtggaaagatcccagcacagatttgcaaggtagaagagcagagagtaagaggccatatgaagtcctttaggttaaatggtattctctaactcagctttgaccagagagttctgcattcatttatttacttaaaaaagtttgttcagcacctactatgcaccaggaactaatctactactcgagcaccagggttcagtaacaaaaaagacaaaaatgtatgccttcatggagtattcattctagcaggaaagatagaaaatgttgggaataagtaaattatacaatataattatacatcatacaatttgttagacagagataagtgttgaagagataaagcaagggaggaggtctgaaatgttacagggagtgtgttgacattttaagtaaggcagacctcattgagaagatggattaggagttactgaactgaatgaggtgggacttttttcccccatttgccaattgatgttcatgggatataatttcttgttcagaactccagcagaaagaaagggtggctggtcgtcctgaatctctaccttttaagatttcatgggtaagataaatcaacacacatgtaaaggggattttctatcatcttagtgagaaggcacacactatggtctgctgaattgtaagtgagtgagagaaggtccctactatggggacagggcagacttcctgtgatctgattggtgtcctgaaagaagagaatttacattgacagaggggaggaaggggacaggtttcaggcaagataatgctgcgaaggaaggagggaagcacatgactgggcatgtggagaaggcatgtggaatactttcatatgaagggagtgtccacatggaggagaggaaggagtgaaagaccaaggttggcataattattgggagatgaagaatatcaaatgcctagactctggagggccttgactgccaagccaaagagatttcttcctctttctgctttgttcataaggcaaactcttccaggaaccatcaatcgaaggagcctgggcagtgcagggcatctaccacacagcatggtgtatagtggctgctcagtgaacacctccgaagcttctgttgaagtgaattgctggttctctagaaggaacatagtaatgtgtatagttttcaaattcttaatcatgtagtttatgctcacatagaaatgttaaactgttagcgctagaagggtacttagaatatgtatcttcatccttctattttgcacatgagaaaaccagggggccagaggtttgaatgatttagtgcaaggtcataccacttagttatgcagaagatggggctcatcttccagattattttccaagcagcttcttctggggacattttcccaaacagtctggtgtccactggtatgatatcttgatataaatatcaacttgtattcaatggaccctaaccccatgtgatctacaatgaaaaactggtttctatcaagttaacttgggaaatgctgtctattatattatcatctcgaagagttaaaatgcacattaaaaaatgtaggctctaagattcctgtagtaaaaaaagttgcttaatttcactatagcatttatccaacatattttactatgatttaattttttccctgaatacctgtaatcttgtggaagtgctcataggaaccaattgtaagctgttctcagcaccagttgacctcttgctaaaaggaaagaagaaggtatataacagagaagcttcagccgaaaacctaaaacactcaaggaaaataaggcagtagagaagagcgagtccctcccacttctatcttctgtcttctctccctgcctgcctttgttccttcctttgataaattacttttgagcatctactagatgcaaatcctcatgctaccggcttcacatacattatcttgcttattcctaacaacccctggcaagatcagtaatattccctccaaatgaggaagctgagctcagaggtagcagggaattgctcaaggtttcacaattacactagtggcagggcccagattcaaaccagtgtgtgattaaagccagtatttttgtccattgtgctattttttcccaggctatttcttcttatccctctttcttctccttctctcccttgtgatgtcaaccacacatagcacatatgttaaaaccaatatcctaataaattaaagaagatactggaccctcaaggagatgtaacaataaggctcctacagctcctatgcctcttaggtatttaatttagcatgtaatttagtattccttaactagatcacaagatcctccagggcagagatttgttatacttattctaaagtcctcactccacacttcctgtgattgccttctgcttggaaggtggagatgataaaatccagaaatgttcattgaactcatggtcctttcaactggaccctgcctattgtcaaaggcgctaactgcaataaggtctttcatcaaaggagaaactgctttctctgtggcagtgggaggaaattttaaatcctaggacttcttatagcaagtgacaccttgccccttaagcttttcacacctgctgcctggtcttccaagtgacttagtgtcacctacttggctgcgttaaagccagtgccagctgtgcccttcatcattgcttgctccaaagaggctaattccaaatgtctgtaaggttgtttagttattaatgtttatacttctctatgctactggattagatactctaggagggtgagagctatgtaaaactcaccctgtgtttccctcacagcactcagccctgggcctggcatggaataagttctcaactgtccgttgagctttttctgaaactgtgctttagaaattcagcaatatgatagactagatagagctagggtttatactactccgtatgtgctctcatgtaatttggcatgtcaatattttgatacacctagtttattactgttctagtgatttaactgtggcccatatataatacagtccaatttggtccaacagcagacaggcccagccaagcctcaccaatgaattttcagcctttataatccacatcaaacagacagcccctaagatatctcaaccaatgctctctgactcgtcaagctcaaagtcatcccactgccagcgtcctttcatccaactgaaaccaatagtattgaggagaagctgcgggattcattaacccagagcatggaaccttattcataggccctaggcttctgcctctggggtattcctggtgagaggctcattatttgtgaccctcagagctttttcctaggtggagcagttatcttttggaagacattcactgaattccccttttgagtgggtgtggacctctcttcaatgctagtcaggctacccctctattctattcagcccctttcctctcctcctctccgctctttcaggggtaagaggtgggcagcattccttaacacgatggccagggaggagggcatggggagaggaacagactacttcaattatttttaacttcaagaccatatacattatgggttcaaaatcaccagaagtcatattgtaatccatacatagttatattcagtcaacaatgaaagttaatgagaagagaattgtggaaaagcaacatggtggattggacagcatttaacctttgggcttcaggaggacttaagtttaagtatgagtcctgttgctttatgggttgtgtgaccttgaacaaacttactcaaattatcaaaagctcacatacttaagttctccaaagcttaatttcctcttctattaaaaagagataacaattgtattaattttctattgctgcataataaatttccatcaacccagtggcttaaacagcacatacttcttatatcacagtttctgggggtcaagactccaggcatgtctttaactggatcttctactcagggtctcaaaagatgcaaccaaagtgtcagccctgctatgttttcatcttgaggcttgagtgaggaagatgctacttctaagtgtctgctgctcattggctgaattcatttgcttgtggctatttggctgaggttcttactgggtattgactggaaacaaccctcagcttttagaaaccactcacagctcacagctcctggccatgcgaccctcttcataggtagttgacaaatggctgtttacttcctcaaggccaagaggagaatctctttctcaagtgtgttaagaagaaattttgtggctgggtgcagtggctcacacccgtaatcccagcactttgggagctgaggcaggaggatagtctgagcccaggagtttgagaccagcctggatgacatagtgaaaccctgtctctaaaaaatgaaaataaatacggaaataagagaagaaggagaaggagaagaggaggaggaggaggaggaagaagaggaagaggaagaagaagaaagcgaaagcttatataacatgacataatcatgggagtgacattatatcacctttgcgattaaaacataacctaattaagggagtgacattgtatcacttttccatattctattgtttaaaagaaagtcacagggaggggattacacagggcagtaacccagtgtggtcccctttgggtgtatccacaataatatctaccactttttattacagtgaggatttaaacagctgatgtatgtaaaacataaaaggaatgtcagtgcctttattcctgtatatgggagacacactaaggcaggtattcttaaagaagaggagtcaaagacagtagatagagttggaggaagagaaatgggtaataaaagaaaagcttagcaaggagagtgcagatgcttctattccaaagcttgtcattagaaatgttgcatatatgtctttgaattactttttgtaaatcagggagagaaacttcctatcactacctctcatatctgccgctgtatccagctcttcgtttttgttccaggtagcagctgttgtagactacttaccagtgaacactgtctggggagttaagaaagaaaaactttcagtgtccaaggtgactgactagaagaatataaatttatgtggtgaaatgatgcctttgagtttcttctaatcattcctctccaatttacctctttctctttactcttccccagattccacaactaagtctttaagagtcacccccttctctttctgttacttaaacatttatttatgtagaacttgccttgagggaaaatgcgagtgaatcagagaaatcagtgaattggacaggagaaatgctgaaggaggtcagggaaaggagttgttgacatcattccctctacctagaggcctaatcccatatcaagtgggaaagaaaatgaaaaactagggtttggagagaaaaaaaaaaggaagaggaggaggagaaagaaattgtttatttctctgaagaaattagcacaggcacacctggttttattgtgcttcactttattgcacctcacagacactgtgttttttacaaattgagcatttgtggcagtcctgggtagagcaagtctacagctgccattttcccaacagcatgtgctcacttcatgtctctgtgtcacatcttggtaattctcacaatatttcaaactttttcattattattatatctgttatggtgatcagtgatctttgatgttactactgtaattgttttgggatgccaccaaccacacccagataagacagcaaatttaattgataaacatcttatgtgctctgactgctccagcaactggcctttctcccatctctcttcctctccttggatctccttattccctaagacacaacattgaaattagtccagttaataacccttcaatggcctctaagtgttcaagtgaaaagaagatttgcacatctatcatttaaaatcagaagctagaaatgattaagcttagtgaggaagcctcatggaaaacctagaaaggctgaaagctaggtctcttgtacaaaacaattagccaagttgtgaatgaaaaggaaagcttattgaaggaagccaaaagtgctactccagtgaacacacatatgataagaaagcaaagcagcctgattgctgacatgaagaaagttttcatggtctagatagaagatcaaatcagccacagcattcctttaagccaaagcctaattcagaggaaggccctaattctcttcaattctttgaaggctgagagaggtgaggaagctgtagaagaaaagttagaagttagcagaggttacttcatgaggtttaaggaaagaagccatgttcataacataaaagtacaaggtgaagcagcaagtgctgatggagaagctgcagcaagttatccataagatctagctaagatcattgatgaagtggctacactaaacaacagattttcaatatagataaaacagccttctattggaaaaagatgccatctagggccttcatagctagagaagagaagtcaatgcctggctttaaagctttaaagacaggctgactctcctgttagggactaatgcagctgatgattttaagttgaagccagtgctcactgacctcttccaaaaatcctagggcctttcagaattcggcttaatttactctatccatgctctatcaatggaaaaacagggcctggatgagagcacatctgtttacaacatgatttaccgaatattttaagcccactattgagacctactgttcaaaaaaggagattcctttcaaaatatcactgctcattgacaataaatacatctagtcattcaagacctctcatgtggatgtacaaggacattaatgttttttcatgccagtcaacacaatattcattcaacagcctatggatcaaggaaaaattgtaactttcaagtcttattatttaagaaatacatttcataaggctatagctgccatatgtaatgattcctctgatggatgtaggcaaagtaaattgaaaccttctggaaagaatttgcccttttagatgtcattaagaacattcgtgattcatggaaggaggtcaaaatattaacattaacaaaagtttagaaaaagtttattccggccctcatggatgactttaaggaattcaagacttcagtggaggagttaactacagatgtggtggaaacagtatgagatctggaattagaaataaagcctgaagatgtgactgcattgctcaaactcatgataaaacttgaggaaatgaggagttgattcttacagatgagcaaagaaagtgttttcttgagatgaaatctattcctaatgaagatgccataacattgtcgaaataacgaaaaagaatttagaatattacataaacttagttgataaagcagtagtagggtttgagaggattgcctccaattttgaaggaagttctgttgtgggtaaaatgctatcaaataatgtagcatgctacagagaaatctttcatgaaaggaagagtcaattgttgtggcaaacttcagtgttgttttattttaagaaatcgccatagtcaccccattcttcagcaactactaccctgatcagtcagcagccatcaacgtggaggcgagatcctcctccagcaaaaagatcacaactcactggaggctcagatgatccttagcattttctagcaacgaagtatttttaaattaaggtatatgaattgtgattttagacataatgctattgtacacttaacagactacagtatagtataaatataacttttatatgcacttggaaacaaaaatttgtgtgacttttttatcataatacttgctttattgtggtggtctagaaccaaacctgtaatatctcctaggtacacctggtactaagaatttgacttcttcaaaattattcttttccagactcagattcaagtatcctttagaaaatagcctttatatatttcctaaagaaaattatttacacatttccagtgtaagaaattttagaataactttcgtcttcacagactaagttgatggtcattcatcattgaaaaagagacagttctctattgtgtggtgaggcctttaattggttgctgctataattgatggtgtattcttttgtggcatatactgagtttgaagaataagctaggtagccatgcaatcatagcataatggaaagatttcagaactctacgtcccaaaacccaaagccaagccccaactctgccaaagccagctccatggccctgagcagtcactaaaccagtctgggcttcagtttcctcatttttcaagtgagaattctgaaatatcatatcggtagatggggacctcatgagaaaataacagttatcagagtatctgacacataaccagcattcaaatatttgagcacgcacggagaaggaatgcataagcaaataaacatgcatttttggcaaatgaattctaggcaatatgcaaagctagtctaacttttacttcttaaatgtgtttgaagttgtaatcttatatgtaagtgtcatgggaatgcttataatcaaagtatacatgtaataattagccactgagaataattagcccttaagagagagtcatagcttcttggatctggaaggcacatttgatgaagataaggtctaggctgagaaaggtttggtgactcacccaagatcatacgctgaatagcagagatggaactagaagccagcaccttgcctcctacttagtgctccttcagcaaggcagagtgtgcccacaagtgattctcagggaagaatggtgaaaataggtactgactttcataatcaaaataatgagttggggtttttttaagttacattttagtttagtttagttagctagcttgtttgtttgtttgtttgtttgtttgtttgttttgagacagagtctcactcttgtctcccaggctggagtgcagtggcgtgatctcggctcactgcaacatctgcttctggattaaagcgattcttgtgcctcagcctcctgagtagctgaaattacaggtgtgcgctaccatgcccagctaattttttgtatttttaatagagacagggtttcatcacattggccaggctggtctcgagctcctgacctcaggtgatccacctgcctttgcctcccaaagttctgggattacaggcatgagccatcacgcctgaccttaaggttacattttgagaatgactttgattaattaaatttcacttgtatagaaatacagccttgaattgccaaaaatgttaaaaattctagccaagtaattccagatgctgaagaaggaggcctatattttctaaactgaacttcattaaagcacctgcctatacatttcctctaatgagtaaacactaaaaatggtgctgcacagggctcagtcctggattcatttctagttaagatgatcatccatgactttgttaccgaaacagcatactcattaagttcatagatgagactgaatttaaagtgtaggctaaagtcttgggggatgcaattagaattgaaaatgacctcaacaaattggacaagtaatcagaaactaacaggatgaagttcaataaagacaagggcaaaaggaagtcaagaactcagagaaaataaagacagagaagtataagacatggaaatggcaagtcaggctgagagctacccaaagatacatgggttaccatgaacctcaaattaacgatgcaaggctgggcccagtggctcacacctgtaatcccagcactgtgggaggctgaagtgggaggatcacttgaggtcaggagttcaaaaccagcctggccaacgtggtgaaacccccatctctactaaaaatacaaaaattagctaggtgtggtggcaggcacctgtaatcccagctacttaggagactgaggcaagagaattacttgaacccaggagatggaggttgcagtgagctgagattgtgccaccgtctgggtgacagagcaagacttcatctaataataataataataataataataagcatgatacaattaagtagcagggtttagcttatattcagagttctatgttttctggaaaggaaaactatggttccgaagtttttatggaaggtttataccctaaatggttcttctcacaacagagttgtgtccaccaataagtaacctggtgtaacaactaatggttactattgctcacaaatttttaaaaacttcaaattttttttaaacctcattatcttctggttacttgggtaggtaatgagtgctgtccttacctactcgacctaggctccatctcaatcacacattttggttcctgcaggtacagggaaatttggctatgccttggccctaagcttctcattcataatagatagttcagaatggttcaaagtatttaatagtgttgttattacattttttagaatcagccatcactgtgatgcttgaacgttttgtcaacatgcaacattctgtaatgtctagttatttctacttaaagccagattcggaataaaggagcatagaacatgaggagaatccagtcaaagacaaactatacaatagagagggggaatgaattggatgctgagccaggaccagagacaacagctatggggaataacagacagaaggcaagatcaatgtgtgagacaagataggcttaacaatagcagggcaaggggcagtatggaagcaggggttttgactatcacttatgaacgtcctacttccagataaagtcctaaactgaatctacacaggctatctcatttaatattcagatctacatataaatatagttgatatctacatttttttctttttggttattttagagacagggccttgctctgtcatccaggctggaatacagtggcatgatcatagctcactgcagcctcaaactcctgggctcaagcaatcctcccacctcagactcccaagtagctgggactacaatcatgtaccaccatgcctggtcttgtatctacattttacgtctaccagggcctggtatccctcttcctcaaggaagtgcagaatagttatttttccaatgataccataagtggaaaaactagcatttgaaccaggtttatgtgacttcaacatctctattttttcaactcaactgatttgcctctaaaagtgtaaaaagaagaagagaaggtgaagagtaagaggcggaggaagtgaaagaaaagaacatgggaaatttaataagggaaagggatggagagagaaaaagatgaaaaagaaaatgagtagaggaaggagagaagaaaagacaaaagaagcaacaataggataaacaggtaagaaagagaggaaataaaggctccagtgaaatgaaagaaaagaagtgtggaaccccagcagaggatgcagtatgcttctgataagagcattctgagtgctgatcaggtcatctctcttctggggcacattatgcttttccaatcttccttgagtactgggtcctgttgagaactgcagaattttcaggagataaaaagaaccttgtgaatgtctattggaaatcaagagaatgattataaggccagtaagtggaacacgtgtgggaacgtaaaaggagatgggacattgaacgttgagaagtgacctattaatggtcttcgggtatgaaaaagctattaacacagggactgctgaaaactgcaggatttatctggcattagaactgacctcttcagtgtctatgaacactgtgactgcttttactgcctctaccactgcagaatctttgtatttttatgacccatccaagcgctatctggcactagggtctgctgctgactggttgccacagtctatgaatcaaggagcattgctcctgaaattctgctgggatctttagtagaatgggcatgatctaaaccagactaccttgcctggaaagaatatggctttggtagagacaattggatttgatgttttgacactgcaactcattagcccaatgaccttgggcaactcaacttttctccctcctcagtgaaatggagaaaacttaacttagctcactgtgtatgcaggccttcctcagggcttgagagataggaagcattccataaatgctatttttcatttcctttttccttcctctgaggtacaacaaacgtgcaaagaggggctcatcttcaccatgggttgtcataattagggaaccaggagtaaggtaactggggtaagaaatggggtaatgtccagaaaattcagacccttccatttccatagatggagtaggatggaatttgccatgctgaggtcaccaggaatacacagttctctgggtaacaggacttcttggaagcttccgccaaccttattttccaagcagttttttagtgtcaagggctgacatctgtgtcctaatacttacattttgaggacagaaccattttgaaatgagagttcaaacagagatggactcatgtacctccagaggtacattgaatttgcaagtgaaaaagatcctttcttgtgttttgagtaccagatggaaaactgaagcccagctcttgcctgtctttggaaagcatgacttttccctagtgatactttctacagtccatggtcagtgctcaagggctgcctctgccaataacccccttctgtttgcatggacatttccattcacattcattcagtatgtacttatgcattcacgtggacatgtcttggttttggtttacttcttgcaaaaacaaaaatcactgagctcaaaatcctttaattatatgattgttatttccaggtattgtagggactagtctcttatacgacttttctttcagtaaccttgtgaacaatagtgtgaaaaacagggtcaagggaggtgcccttgtctgagaagttgtctcttgtgtacttaaaccattggaaatgagcttttgcccagtttctttgagcagaccttgtttgtctctttgttttctcttatgttgtctttggctcaggtcaaggagtacataactctcaccatctgggacagcagaaagatgacagcaggtttttctgaaaagtagaaaccttcctttccacttgagtgagaaatctaatctcgtttcttttaaatcccctttgccactcagacacataacacttatttgcaggtcagtaacagcattttggcctagactcttaaccaagctctgtttgagttggtgaaacaattcactgattgttagtaaataagtaaagcctgggccttatttatatggtacacaaagtagacagtaaagggagaagaatgctgaaatagtaggtggatgatttgaataagtttcttaatagatgcagtttctctctatattctaagggtatagtgtcctaaatagagaagaaaactagtaaatcttttcatcagggtcctgcttactattaggttatgaatgataataatttgttagcttaggtaaggccctgtgtcgtgattatcgttatcattttgagagaattctgactactccatggactattttttgctgcaagtgcaaactgtatggaaattgtgacatttccattcactggttggtgccaaaacctttactggtgatggaatatctcacttaagaagacaactgatatttttcttgaggaaatgtacacaggtgtgtaattaaatttcacactgtccttttctatacttacattttttaacctactcaacatgggccatgagtgttatgattaaaaacatacaaaggggaacagtgagcataataaccaatggaggttcatccttcaggtttccactgaaacatcagttacctacatctagattaattcctcttcttgcatactaccctgcaactctgcctattttctctttagctctcaaaactcatataatttctcatctattgcctgaatttggccaatgagtacaagattataaaatccagtctttcaacttgcaaaatattctaaatgtcaatgtctctcaaatttgtatcatcagttttgaagcccagactcttatgcccacctactcattaatatttctactgagatatatgataggaatctcaaacttaccttgtcccaatacaaactcttgattttctctgtgagtctgtttcacaccctccatgttcctcattttaggcaatatttattgagagtttcctttactctagatgctgctctaagtgctttacaagtattaacttgtttaatcttcatagcaaccctatgatttaggtattattaatatctccatttaacagaggatgaagctgagattcagagacagagatacagaggtcatacagttcatcactagcagacctgggctttgatttgaagctgtctggtatcaataactgtattggccacagcctaatcactgttctgcccaggatctgtctcagtaaatgtcaccaccattcacccagtggcttgggcccaaaacctcagagttatcttcgatttctctctttctctcaacccaatatcaaattcattagcaaatcctcttatctccacctgtcaaacatatccagaaagtggccacttcacactccctctattgccatcatcacagtcacgtccccatcacctgttcccttgtcttttgcatccactcttgctccccttagtcaattcctgtgtagcaaccaaagtgcttctttcaaaatgtaatagtttgtgtctgctatttgctcaaaaccctgccatgactttccaccacatacagaatacccaaagccttactatggctgcaggcccagcatggtctgtgtcctccctatctcaccagactgattttctgccactcttcccttggttcccccaaggttctccagctatactagccaacttgctattccttagacactccaagcaaagccacatcaaaagatctttgcccttgcagagtcttctgcctgaaatcctctttcttcagatagtcacatgacattcactttattcaagcctctgctcacatgtcacctctttagaagacttttctgaacatcctgtctaactcccatcacacaccatcctctttcccacctttaattatctcaatagctctctctagctgatattttgctatatatttgtttattgtctttctccctcactagaatgttctggagggcagggactagtttatcatcactgtcctcagcacctagaaaattcctgactcctgattgttgcgaaataatacctgctgaataaacgaaagaagaacttatattctaattacacatgtgaatacaggcaacttctgcctaagcttaggtctccatcataaaatctgtgaggtataaaatacctttctcagcataatgtagaggaaactccaatacacactcatttcttcactgccactaactgcctaaatgaaacagaatgccttgcttaaaacaagcaaatggctagattcagggcaccaagttagaaagcccaggttcacatacatgctaatccttctgtgcttgtactctaccttttgattgctacttacgtctgctatttccaacagagactgcagacactgggtgtctgttgattccaattagaaaattgtcttcattgcaaagcagcagggggttgtagtccagatgtgtgtggcatttccatcttcctctgctcctcccaggaccctaaactagtaacatggtgtctgggaaagtgatggaagagtagtgagagggagaaatgagataagtatccattcttcacccagaggagcatttaaaggcatctattgatttcccttcctgtagaaaacaggaaaacatcaaaaggccccctctccatttccagctgacttggtttcaccatctccccttctcagtgtgaagaggtttcctcccattttcctccacagtctacgtttctcagcctcctctcagcattaatattccatcagaccccagaatgaacactccgagtaaagcagtttctgtcctgccttactggaccctctgttggcccaggcacctgaatgaaatctatcactctctgggcagtgccagcacgaaagtgatttccatggattggcactaagcagtgaagtattgactaaaaagaagaacacaaagaggttaaagatgcatcatttgaagattgttacccttctcttgctgaattttttcatagcctcccaataatgctcatccttggaatgggctatactgcccagtcttcagtaaaactctaggaaaaatcaagaaagtagcaacgagttcagataacaggatcctaactatagcaggatcttcagaagttactgtgatagtgagaaacaatgaaacaacacatgtgtaaataaataaaactgtcccccagcctcacacaccttccccaaccatgcccagtatggcagaaactgttgggtacttaacaaaatgtgtttgttcacctttctgggtatacagatggactctatttcccatttatggtgaggtgtggccatgtgatggacccgtagccaacataatatgggcagaagtgatgggtgtcacttcaaagcttagcccataaaaccctcccctgacagctcaactacgctccttttgtctctcgctagttggaatgcagacacctcctagggactttggaagactcctgttgaagatggcagagtctccattggcttgggttcccaaatcactgcttagaaaaggctgccctgccaacctcaatgtggttacacgagctagaaatgaaattctattgtgttggaattataatacatttcacagactatttgttatggcagttagcctaccatagttaatacactggaagttataacgtctttctcaataagtgtatttctctttcctcagtttcattacaagctcctggaaagcagaatctgtgtatcccctaccgtatcccctgcaggatctcatacagagactggcacaggacacataattagtaaatacgttggtcagagagattatgtctaccttttattctggaacatgagtaggaacatggccaaatcatatgggtttttcattttgctttgaaatccatcttgggtgtgaaggatcttttatgtatgtatagcagctcaggactggcatggtcaacgaagtgtgacacacattttttattatccataaatggattatctgctgtgacccagctcttccatcattccggcacattcctcctgtcagcagctgtgtcgtaggcgctgagagggaccctgagccaagggagaatcagaaacaggtggggtgggtttgggggtgggtgctggtgttactgactgggtatgagttgtgaatacatctgcaagtcaaataaaatgttgattatcttttcactattatatgcatcttcttattaactattatgagacataatcaagagttgacaattgaaagatataagttaagaccaggtaggagcaaatgaaactttttcaagtcaggaatatattagtttggcatgagctctctttgaggaaacaagagacattttatttctaccagctggctgcaggtcaggcaggcgatacctggtaaatattaaaatctttgttgtagaaggggatgagttttaccctgcatccttgattactccaaagtaaacttccagcctttatccttagtggcacaggccagtatcctcatgaacacccctaccaccattacctcctacttttctccctgtctccaaagactcacttttggaaaatggttgtgtaaaccagcagttctcaaacattagcatgcgtgaggctttgttaaaaccagattgctgggttctgcccacagttgccaattcagtagttctggagagatgcctgagaatgtgcatgtcaaatgatgcccatgctgccggtcttggggccacactttgaccttcactggtctaaacccctcaacctcattctatatcagtgaaggaatctacaaacatgcacaagtgcaacagccttacaaggtcaaggatcccagcacctgggagtgactttatgtgacttccctttcccatgaagccagattgaggctgtgaaggaggagtggagttctcagggcagctcagtgaaatgtcacctgacagcagggacccacacagtctctcttttgcttctccaaatgtgttccctcatttccccactaggaaaatcaataggttgccacagatgtgtgggtctcaattctggtgcccattagaatcacctgcttagcgattccaatataattggtctgagataggtcctaggtatcagcattttaatcacattacaggtgattctaatatatacactggttgaaaaccacagacgttttctaggtcacttccagatctaccagtctacctgcacaccctccctccccgtggaatcccaccttgtctacctttgcttagccctcaaccctccagcctagctgaactctttgcccttacctctctccacatacattatattccattcaccctgggacacaaagttgcttcaaacctcattaacttccctgcttaggcagaggatgagtcccaaacaactgcagaaattcactgataaaaatatagacaacaaaataggagcagttctagaacccctgtgaaaagttaactgtggaagcagtgggggaacccattcctggaaagtaacttttactcataaagtcacacctgagcccgaagagtacacattacacttaatattggctgcatattatctattctcctgggctggcccaaccccattttgtggtgattcctgcagattgacatgtactttctatttacaagtgactcatgtgataacatttctgcaaagatggtggcttttgcctgataggaattcaagtgctaccttaattttctgttttacttatcttggtacagatgtgaacttaccaactgttagcctaacttactttcatttcattctcttttgtaaactgaactggaagcactggaaccttcttttctgaacttcacttgaagctttggttggtggagattttccagttgagttgtcagttttaataaggttattgtttggggttttgttttctttcaaatggcttaagttggaggggaagtctagtaatttaattctaccatgtggtctggccatgaacccaaggcctgaggactggtgcctttctgctaattaattctcgatgtcagacatctggaaacccgccttttctgcctcatctgagttgactaattaattaagctatgtttgtaaacaggcgttttctcctcagcacttctttcatcatctgtttctttagccacaagctggcaaccccatttaatggtagactacctggccaataattctgttcttgcacaggctgtggaggttcctttaggaggccacttagcactgtgcaagcagcccaggctttggagtgaggcaaatcaggatttgaatccagttgagccatttattaattatgtgaccacaggcaagttacctggcatcttaacatgtcagtttccccattttctccctgcaaaacctaccacttagcccagtgtctggcacatcatttgttactctctaaacactgagtatttttcttttttttcttttctttttggctggatgggagcattcttgccaacttccttgcctttgtccagggagtagctagtttcaaggcacttccacaaatattttcaccttagtttctctcaaacctatatgagggtattttggcaaatgtttttaccctcatattttacagttagagaatcagtctctgcaagtttatgtgccaacatcccatgggcagtcacagacagggcttggccaggtcttcatgctcttggcgaaaatctcttgctttgagaccagatatccgcctgcccttcagtggaggatgtgagactagattataaacactgggaggaaaaagttgcacaagatatactgagagcacctgatatggtttggctctgcgttgccaaccaaatctcatctcaaattgtaatccccatgtgttggggagggacctggtgggaggtgattggatcatgggggtggcttcccatgctgttctcatgatagtgagggagttctcatgagatctggtggtaaaagtgtttgacagttacccgctcctgatctctctctcctgctgccacgtaagatgtgccttacttccccttcgctttccaccatgattttgagtttcctggggcctcctcagccatgcagaattatgaatcaattaaacctcctttctttataaattacccagtgtaaggtagtactttttagcagtgtgagaatattgctgtgtaacaaccacctcgaaacttagtggcctgaaacagccatcattttattactcagccttctttgggtcagcagtttgaattagaataagtttgaattagtggtttttgggttggtctccagggggtcacttatctgatgagtctaccaaggctgaaccatccaaaatggcctaatttgtgggtctagtgttggtactggggatcagatgagcctcattctacgtttggttgtcctcaaggaggctggcccaagttttttcagcattgtcagcaacattccaagaggacaagacaagacccactgactatcgctcatccaagtctctacatgtgtcacatttttcgatatcctattgggcaaagcaagtcacaaagctaaactcagagtcagtgtgagaaatgattggaaaagggcatgaatactgggatatctgattcatttagttaccactaatataagaatctaccataaatggatataaaaataatatctaccttataagactattctgaaaattaaatttcatactgcatgtgttttgctcagcatcacctctgacataccaaatgctcaataaatattagctagtattggtagaatcatcattatctattattagctgccaggagcaggttccccttttgaaatcttgctgttatgtgtttagctaacatttatttagtgcttaccgtggtaatcttccttatgctaggtattggggataaaagaaaatgataatattcagtccctgccattgaggaactcatagtctactggaggagaccagacacataagcagttagatataagatatcatggcaagttgtgaggccgagatatgcacacggtattttggcagtacaaaggaaggatacctaaccccttagtccagccaaggggtgtggtaaggaaacacttcttggcatagatgctactgagccgaatcctaagggaagagctgtgtcattcagaagaccaggggtttaaaatagaggattttggcatgagtaaagacattcagataagaaagagcattctgtgttatcaaatgaaattaaaaggctaggaatctgaagagataagccaaaaaagaaacaaaggcagggaggcaagagagagagaggaaaagagagagggagagaaaagtaaagaaagaggagaaggaggagcaagaggagggaaggagggaaagaggaagggaaaggagaaagggtgaaacgtggggaataaatgtgtaattttccaaagttagatattattctataggtgaatgaggaggccctgacagcctttgagaagggtaaggatgcagtcagatgtgcagtttagagcaatcactctgggggccaagtggagcatgaatggaggtggggaaaccattaggagtaatgcagaaatccaggcaagagggagagtatctgtgaatggaagtcaaggtaggatcctttctatttccaccctccacagctgaagaaaagcatttccgtgagagatgcaatgaccttggatatcctagtttgggagcctatagtctagaatatctgacaaaaaactattttcttcactctttacagatattcttatctaccaaattgaccgttattgtctagaagagtggtcgaccctgggcaatcttagagtgagtgttattgttaagtatttagtcttgttttggatggccctggtgaggtgtgaggaaactgttctatgaatttgacaggtcaccttagagagaacagtaagtacattcttagacacagatccttcaagcctttttttttctttgtggtctaggcttctaaaattataatgtattttaaatgactttgacctcttccatttgtgctccctcattgcctcagtaattcttatgtgtctctttaatgtttataccttgtttcttttcatatgtattcacaaccttatgtcttgaatttcctggatgatcacactttcaactacattgcttcattgtcccagaaagcacattcataattatcagtgtttacattcagatttgtggtctggaaaatattgtcattatacttatgcaatatgtcccttttccagaatgcttctcattactttctttctgatacttctgtatgggcaccctgcagtgataaaagcagctctctgcagtctcatctgatgatgtcctgctctagtccagctacatgttctagctccaaagaaatttgcttgagaaccaattttgcttgtttgattggtttactaaatgtgcaatgatttgcatcacttttcattagtgtcctgagctatatctgagaggggttagtttagtatgtctaagatctatcagtagattcctgcatattttcaagtaaacttttctttaaacatattgaaaacacttgaaattcagagaaggatcatgaagagggtgtaatgagactgatcaggaggcaaggggtagagcaagctggggaccagtccagtaagccttgtttgaagaccagtataatcatttctgactcccaggggtcttctgcaacaacctggtgccttctgcatggtggcgctgtttccactcagtgtctttcatcctcctgcttctttgggcccctagaccatctaatgctatggcaggcccaaggcacacagaactgccaaggagaataggacaggtgggtattctagatcagcatcatttattagacattattatgacatgcctgatactgttctctgcattttatgtgccttatggcacataatattaatatttgtggcatagaggagtggtaaaaaacaaagcctttggtgtcagactgcctgtgttcaaatcctgtttctgccacttacttggtttgggaacccctaagtggggagtcttaaaggacccttctggttatgagctcttaatcctgggaagggtcttgtagaaggagtgcatggggaatagaagaggagacggaaggcatgcaaatgactgcacctagcagcagggtctggcacatgggccaggtggtaagagatgccaagtgacctgctgagtgcgtttggctgtgactgtagactctgtggctgtccaagcacccccacaaggcctgagggccaggaagagaatgcagccacaggtcactaaccaaacaacaggaactctagccgattggccctgcctgaacccaagactcaaagagcttgagtggaggccccctgctgcttcttcctttggagagacacttgtttggaaatggctgaggaatctgcctgtcacttgcaacccaacttacttcttggcttctgagatgttgacagaaattggcgatgataaatgtcactactgccaccacaaccactgtcatttactcagggctcaccatgctccaggcactttgcaaagcactttatgtacattattttatttaattttcatcagaaccccacaaagatagttatattgccatttatgaatgaaatacacagtacattatgagaactgttttgattataaagaatagacacccaacttgaaccagcttaagcaaaagacaactgtatgataggatactggatcatctcaacagaactcacaatgggaatgtggttgagcccccagaatagccataaaccgggactctgatgctgtcatatatcttgctcatactctcacttgtatttacttttcagtagcttctgccttcattcttctctccttccataggtcagtttctccataggctacaaaacatggctgcccagggcttctgaattttacatattatagcttatgccactagattgagactgacttaacattctcctgggtcctaccaaaaatcccgaggattcgacccagccagtcaggtgccccacccttcaacctctcagctatggctgggtcagtgagtagaccaggaggtggaataaaatggcaacctccacaggatcacatgggtggagttgaggaaggggcagttcacaagaggaggagataaagagctatggtgaggggggaggggggagggtgggggggagggggggagagtgagtcagaaggagaggtagggatggctggttggtagctcaacagtagccatctacaacacagggttaaaaagattaaggaactcatccagaatcacatgcaaccaatgatggaaaagcaaggattcaaattgggcatttctgacttcaaagtctatgttccttactaatatgacaaattagaataaagtagggtgaatgaatgagttcacatacacatacatacatatttgcctgagtactaatgaagaccttgccaagtcagtgctcaaatccagagagtcacagttcagaattgtccaacattacacacttttgctctaccctcacaactgtcatttgagaataaaggtagagagtaatgacaaggtaacctgatgacaagcagtatcagtgattgcagcctgtggcccagttcccaaaagcagattataacagcatccctagaacccacccatcattttcagtcagcagttcagcatcgctgctgagctgtgttctggagcaagccaaggccttgggcatggtgcacacatgtccaggaagaagttgatttagagggagtggtctgtttgagtggttcctcactgtgtcctgcatgtcccagaagatggtttgggacccagttttgttgttccagaagacaggtcttcattggaggaaggcacatcaaaggagaaggtagagctcggttctcactgattgagctcctataagtctaagaataggactctgaggattatggcttcccaaggatggagagttgtggcttgggagtttttgagcccttgagccaagaggcattagatacttcaggaaatcctgttgaatctttccacctatttgagcctgtttagcaaactgtttacaaaattctctgacctaaaagaattaatgcccttttctaaaatggcatcttgtcccagggaggggtttatgacgaggcaccacctcgctcaatgggactctttggattcaagaccttgggtaaattcagaagggtactggcatttttattcctgtgatttctgtttttatttgcacgtgaatgaaaataatgaatgaaaccaaaagaacctcatagagttcgccctgatgtttggaaaaaattgagttaaaagcttgggaagtagaatttgttcagtatttcccccttgacaattgcaagccacttgcacaaaaaattatgtttctgggaggaagtcacattaaggagctgcactgatgttttcaattgtagtagtaatagttataatgagaaggaggaggaaaaaatagcaaatacttgcagaaaactaatgagcccggcacagagagattaaataattcatgcaaggtcacacagcttgtcagtaccctgcctcccactgccaccagccaccattctgcctatctggcccccattgtgaacttcggtcgccacttgccatgaatcctttagacacaaccatcagggatcttgggagactagggtgagctgaaacagactcttctactctcttagatcacagtaagtttgcaaggaatatagaggtcataaatattctcttggtaacatagcgtggtgaaaaaaatatgagctgctagagtcaaacaaatcagagacaaaattctggtccgtcaatgagccttgggttttttggtctatattgtaggcaattaataatatccaccttttttagtggcattgaattgatagacctccacaagaagtgcctggccctcagcctggtccctaatggctctaattactctaatatgatcacatctccacccgtggtgttatctgaaatgaccataacagctctctggtgctgagagaatcaacaacttctattcctggcaggtgagtctgctctacctcccccattttcccattccttcactctccagagtaggaaagatggaaggaggataagcagcgaagaagagtcactcagagggcagtgcctagcagcaacaatgggtacacacagcgctgagggggcctgggctctcttggagaggcagggctcagccagggatagcatctgaggcccgagatggcaatggatgtctcagtgtccctgggagagccatgcaggtgccagacaggattggctggatgggcttcccttcagcgtgtgtacccagagacaccggtccccagcttagtaagtgaagaggcagtcataggccaaaggcagtcatggatcaaatttaaatatggaaattatttccaagcacacttttcaaaaactagatttctaaacctagatggcactgaatatgcaaataattaggagaagaagcatcaaagccatgccagtggcctttttagatactgcagcagattgtgccattgcacttagagccattcacatagaactgagtctgtccagggtaactttataatcaggaaggctgaagagaaacagaatgaagcaggctttacatcttacatccttttcatggaagaaagaacactggagggagatctagtggaggctttgtggagggtgtgcagtgacatcagtcaataatttactgagaacatagttgttattcatgccagtacaagggacaaaaaaaaggcaatctaatatagtccctgccctcgaagggcttaaggaccagttcagagatatgaattttgaaatacagctaacattttaatatgatagccaaagggagaggttgacccacaaaattattacaggagatcaaataagaaagctctttctctgggctggggtgatcagggacagtatcatggcagtggagaggtctgagaagggccaaggagaatgcagaacattcctgaaacatggcaaggggacagacctgcaggcaggggaaggtcatgtgcaacaacagaaagcaaaacggcatctctgtcacatgtagtataggaaaagctacatgcaaaagtatactaataccaaagaagaacactttgggaatggggtagattgttttacaagttaggtaggaaaccaaccctccatttaagaagaatattatgttctactgcaaaagaaaaacagtaaaattttgtgcacagaaaaaaagaccagtcagaagacaaatctcagagtgggaacaatatttcaagcatacctgagagatgaagggttactatcatactacaccaggagctcttctctatgaatggataagaaagacaaacaactcaatagaaaatggataaaagatgtgactagatggtaaaagaggaaaatttaaatggctaagagatgtggaaaggtgcttgcgctcactgtgaggcaaggagatgaaaattagagcaggaagatattgtgtttcattcctcagattggcaagcatttagtagtgataaaaacttagtgctggtgagagtgtgagcaggatgcgctcttgtgctttgctgataggaatttcaattgttgcaaactgttgtattctggcaccattgagaacatttaaaaacatacatatccttttgttccgccttttcatttctgggaattgatgccttagaaataccaagatatgtattatgtcttctggttaattttttggaaatatcataaatatcaatagggctatgcttgagtaaataaaggcacattcattattataggctactatgcagttcttaaaagaagttagatctactgttggaagaaattccacactgaagtgggaaaagtaagtggtagagaaatgtgtgtattatgatttgatttaggaaacacgcatacataccaagtcacacaaatccccttctttgtatatatgtagatgtattttgaacggatacagataatgcagggccatacagtgttagaatgttcacttggttacaaagaaatgagggggagaggtagtgctgtagtttgaatgtgtcccccaaagttcattaagttggaaacttaatcttcaatgcaacgttgttgagaggtgggaccttttagaggcaattaggtcctgaggctctgccctcatgagtgaatgaatgacattatcaaagtagtgggttggttattgagagagtgaatttgttataaaagtgagcttggctctctcctgctctctctctcacacatactctcctgcccttctgccttctgcgtgggatgatgcagcaagaaggcccttgccagatgccagcacctttatattggacttcccagcctctagaagtgtgagggatacatttaaaaaaaaataaattacccagtctgtgtgtttttttttatagtagcagaaaacaaattaaagataggtaaatagagaaaaacaaagattgagcaaaatgaagtattatcatatactcaaacattaaaaatcctcagagttgagttaagatgtatagctttgggggtggggaagtgagggtgtcctcctgtcctcggatttctgctctattcagagtctgaggcctgccccggggctgcaggacagaatgggatgcagaatttaggctgccttgcagagactctgcctcttcctttagcttgctcagggaaatagcatgtagctttaagtttcacattttaaaagtcagatgaaggcttaaaataagcagcaagtgtttcatgttacatccagatgtcatctcaagcaaaaaacaaaaatgctttgatttttgaaaaataacctttgacgcctaaagaggctctaataagtgtttttgctccagaatcttaaaaaatgactttctatgcagacaagagaggcagcccgaggagaccgatgtcctttgctaatctatgcaaggactgcagcagcctcaataccctgccctggtcccctctcccttcttcacaatgacacattcgcccttctgctcacatcaactgttcatggtggggggacaaacgtgggggctttcagagaggaacacagtctctgtggtctttttaatgtgtggccttgtcagggtgctaattggtgccaatttcactggcagtaatggaggaatctgttagcagaaggaagactttgaagtctaaaagcattacagattagttccctagaattttcctacgggaagccttatgagccaagtccactcgaaggtaccacaggtttgtaaggtagactttccttctgaggagaaattcccagctattcaggtgttcagcctgtaccaagagaaccaaaccagaaactctaaaacatcactgtttttctgaaaaaaaaaaaaaaaaaaaaaaaaaaacaaaaactaggcaattttttttttctcttgaaaaagatgattttggtcctcaagagatctttttaaatgttagaatggcagataactgaattttttgtagacagatgttgtgaaatgtgcttatggtaatgatgtttgtttagttacctcaaaggaattctgagtgctttacagtcattttcttcattatttcttaaggttttttattttcctgatcatattttaatctcaagcataaattcttcattcagttcttctcgctacattgtctctgaaatatctcctgttagcctcatgttctaccgctgtctgcacttctaggattgtagactcacaccacttcggacatcctggatgcactttcaagatgtttgcttggtgtctccggcttctctttctctatttactatttttcattgctctttcaaacttttccatttatatttttcaccatactttctcccccttgagagaaagattgcttgaaatacaccttgttcttctacataatttttgtttccttttttgttaattttagttgtttactcatttgtaacctgcctttgctccataaagaattggcagtgactatctaaacatgttctttaacatgaaccctgtttgttggaattgggaatctgatattcagattttttttttcaaaaaagtttcacctttcagtactcaaggaatttaactttccctcttatttttttttcatttccttgaagaaacgaaaaaaaaaaataacgactttaaggcaagctcgtattttgtagaaacaaatcagatactgccaccccttcaaaaagtaacctctaaaagcacctcttcatcgtgctttaatttgtaggatgtagaaagcccctgtcctaaagaaattatgatcatgaaattatgtggaaggcacctcagaatgccacacacctatttttacagatgcagaaactgaggctcacagtgttttagaaatgtgtttacagtctcagaaatactcagagacatgtttagaattattttaattaagacaatcacttggaacatttaaaaaatcattaaagaaggtggtagataccatgaaatgatgaatgattgggttctgggcagtggtgagctggttgacgtttaacaacaggggccagggctggacagagggagcctgattgatagtgtttgccaacttcacggtgcccatgccagtttcaagctaccagcctgacacccttgaacaaggagttgggaagagatgagcacaatccagtcagctctcaagattggcagagatcatccggctacagtgagcaggcccgtaaggaagagaactgtgctagacaattgctccccatgcctcagaccttacaggtgtgaaaaataagccattttcatttagcctctgcaccactctgttccctcactcttgccctttccttggcagataaataactcttacctcctcagctatcatttacgtttcaagccacagctcaaaatgagggtctctgtgagatttcttctgattcttttagaaaacatcacttctactctgaatgccggagtactttatttatatcttttattacagtaattaccaaagcctaacttgtcaatggatagtggatattagagtaattaccaaagcctattattgtcgatggatagtgtcttttccctctagactgtccttggaggaaaaggaacatgtcttactccttcattgtcagagaagcagtgcagagtggtgggtaggagtccaagctctggagtcagactgctcagcttcaagtcacttaccgtgggagcttgggcaagtcatcaaactcctctgtagccatctgtaaaatgaaacattaaatgtgagcttcaatctcacaggctcactgtgatataatgagattactagatatggtcagtgcctagcacatctataccctcaacaaatgctacctggtattgttacctctagcacatagcccagtgcctggcacagaatcggtttgcagtggttggtggttgaaatgaatggacttgaagtaaggatattacccagctaacttggtagaagttgggaaagggtgtgatagagggaactgcgtgaacaaactactgttggggaaatgagaatgatatatttaataaaaatcagtagattatagaattataggatcagaacccagttttccagctgtggtatgatgaacacagagcaaggtaggatcattcgtaccttcccttcaccccatatgctagatgatgtatgtctataaatataccattgttattgcaatagcttttgtagactgctgattgaaatatctcatttttgatactgtgcaattgctttttaaaacatcaaaatgctagattttgagtacaaatactgttacatttcattcagtttggttcagttcatcattccaactaattcatatctcctccaaacttgattctgcaatgcagtttatctttcctcctatctagttttctgttgtctgcaattttgtaagcatgacttgtattttgttttctaaaagactacccaggccgcttctaagaacagagtcccctgatatgacactagtgacttttttctatgttggcagtcattcattaaacaatctcttttttttcctttttgggtacagattttaaactcctttcaaatctatcaaagtgtgcaatatccttattgttcacaatagtatctgagaaactctgccaaaatgttatgtctgtagcattttttcccacagatatagtaagtctattagaaaagaaaatgcagctagttcgttgcaaagtgttcctgattaatccatgttagctcttaataccaacaacttccttttccaagttgaactaaggattcatgatgtaaaatagtgaagttaactgtatcaaggtaggctagactcaatgtacagaccttgactatctaggtgagaaatttgggcacaattctgaggacagtgagagattgttgaaatttttgaatcaggattatatgacaaaattgtgttttaagaaagccatctggcagcagtgtccacaatggactctggggggacccttagtgaggtttgaaatttcctgcaataatgtcagaatgggccgctgggctataataggccaggctagtagcaataaagatggaaaagaataaatttggatttaagagaaaaaaaatcaaaagggactgttgagggaagatgataggaaataaataaataaataagtactttagggcttctcaactttttacacattattgaaggtgcagaatataaaccagtttggccactagggtaaataggcctatttggggagggggtgaccaatgtcctggacccccaggactgagtctctcctctcccaattcctacctggccaaactggcagaggacattagtatctccactggctggagagccatttggaaatttctgttttagaaataagtagtcttagcaatatgagaaaaaacggacttgttctaaaatcaggatcaacagttcagagaagcctatacacatgaaggaaagcaaacgtttggttcagtgcatgattctgaacaaagaagcaaaacatcatttatacccttgaaagaaaaccaaccagcatcagccaaacaaggactgtgtaggtaccaaataagatagcctatgccaccaagccactgcctgcattataatgatgcagtaacacaagggcagtggctatgcaggctactggacaaagaaaccaagaaggagggagtctgggttttgcattaatatggaaatccaagccgatttgcttgaaaatttatgaagtcctaccaacttgttgcttcttattgatttctgtagttaataaattaagtggtgctgtagttcctggtgcctcacctgttctactaatttgcattgctgcatggaggaaatcatagattgagaaaatgcaggtgcttgcaatccataattccttacgataattgaagatgctcagttatagaaaataagcaagtgttccctctttctccattaaactcaatgagacagagagaatgagaaccccccaacaaagccatgttgattcccttataaataggaatgagtggctcttctgaaaaataatggaacccatacatttctcaggatggttgccagcaggccgccatgttcatgattcagggacactggcctttcacattggagcccatgtggatggtgctccatggtgttggggcactcagcctgtgtggccataggtggtggctcacagagagacatatctgattcatcccagggcttccacccagcccaggaggtgcacatctgcattgacccatgttcatccccagcctaactgtgctcccttcccaaacagtgttagtattctttaatcccaatttgtaattttattccaatttagatccacctagctctccccactggatctcttctacagccaaaacacatcattttggctcatttgctcccattgttctgttgacatttccaaagctatctgctgctctcaccatcatgctccttgttacagttaaatagaaaaaactggcagccacacataatgcgggaactccagcatcctcacttactacacagcgctgcaagatatttgtttacatatctgactccactcactgtgagcttcatgaaggatagaatgatgcttctttgagccatgggtcttaacagggtgccagcacatagtaggtcctcatttaatgtttggtaagtgagtgataaatgaatgtattgcctttcttacatttggacacagtagtctcatttggggcacatgatttaaaaagtattcctatctctagtatgtacaatgttggcacttgttggcttttgttcaactgcttcctgggattgttcagacaatactgggacaggctgtttgttatgttgtggccagtggtttctgattcttgtgttcatccttgtgcaggtggggaagtggaaagacaagtccctgcagatgaagtactatgtgtggccccgaatgtgtccagagactgaagagcaggaggatgaccatctgagcattgtgaccctggaggaggcaccatttgtcattgtggaaagtgtggaccctctgagtggaacctgcatgaggaacacagtcccctgccaaaaacgcatagtcactgagtatggcatcctctcaatgactttgggtggcatgggagagtcagctttgatgcacctgttagcacttggctggcctgagacctgaggcatgagaattgggcactgtgtctgatttctagttgcttttgagctgtgggattactggcagccctctggtctgatgtctcgttctgtccagctggtgacctgggaaaatgatggccaacttcccacgctaaagtttcttcggtcttgcttggccttaatgattaggacctcaagtttatggagatttaagtttacttctggtgttcaaatatgttttcttgggccagcatgtcccagaatcttgagatttagaaccattttttgaaaaatataaaactaatctatgcttttaaaagtcaggataatggttctccttggtgtgaagtgcctagagtgggaaacaagaggcctctctggtactggtaacttttctgtatctggatccgggtgctgattaataagagttcagtctgaaaagtcattgaactgaagccttcaaatatgcacccttttcttatgtattttgtacttcaaaggagaattaaaattaagaggaaacatatctcaatatgacgagataatgagaatattgcaggtctgttgcctgctttatttcttcactcgagtctagtataaattgtgctgagctgtgaagggggcctgctttgggattggaggttttttaatggcaaagggtaataaatgttggctttttgtacaaagacttttttgtttgtttgtttttgtttctttaattggctaggaataaaacagacgaggagccgggttacatcaaaaaatgctgcaaggggttctgtattgacatccttaagaaaatttctaaatctgtgaagttcacctatgacctttacctggttaccaatggcaagcatgggaagaaaatcaatggaacctggaatggtatgattggagaggtgagtgtccacaagggctgtttccatttccattttcatttattttccttcttctaaatataagtttaaaacgtgctcactttatgcatttcagaaaatataaaatggcaaataagatgtattgttcccactatacaaagaaaaccactgataggctgtattttccttgtggtggtcccttgccctcctgaatgttttaattggagcatcgcgcctttcttttaggtggtcatgaagagggcctacatggcagtgggctcactcaccatcaatgaggaacgatcggaggtggtcgacttctctgtgcccttcatagagacaggcatcagtgtcatggtgtcacgcagcaatgggactgtctcaccttctgccttcttaggtaaatgatgggtttgctggtggaaggaaatggacgtatggatggggaagtgaaataaggaaaaaaggagcacatggccaggctgttccagctagaaggtggtttgctaggagctcaactcagccagggacttcacttaggggacttcaaaatcaattactctcaaacatgaaagctgatgaacacccagaaaaataggaaagcataatgccatctaagaaagtagtactgggctggtcctcagagggcttactgtagtcccattcctgccatttagtcagcatgtgaccttgagcaaatttgctgtatctggggacttggtttcctcatccataggagaagtcatttcaaccaggctgatctctgagactgcttcttgccataataatttctaattctggatatcattgaaatatctatttatttttaattatctgcaagaattgcgctcagagctaccaaaaaagattttttgtttccacgcaaattttctgaggctttgccagatagagctgatctgattcttcctcccaccccactgcacccctccccataccattctctccagcatcacttaaatgtcaaaaatctcagacgtgatataagactgggtgagatgaggccaagatttcaattagatgaggtcttttgtgagctcataccccatattttttgcaggggccatggaatgaggggttggaaaataaaacgtcaccttgaaaacagaacactgggctagcagaaaggagactgggtttggcataaacaagctgtaagcccctggacgagtcaccgtctctctaaggcacatcaacattttttaaatggggctattacagtagacagtgactaacatttctttaagctctaaccatagggaattaattcaattaatgcattgcaaagtggagttataggctccatagaatttttctataaattactcaaatttcttagctaatcttcttactcagagtgaagcaaattccagccttgccaattttatgtgaaatgtgattagatagtacacactgtatccagtaattctcatagcttctatacatattttatttgcttttttttttttttttttttttgctgtgcaaggatagttggaacattaagagatataaacaaaaccacattctaattctaaccttgtcagtatagcactaccttaacttctgaactggcagagccagtggtacattaatatatccctggaatagcatagaaatgtcaggcagggtgtgtttacgtctgtattcagaggaggagcagttagttatagggataagagaagccaacatttattgagcacctactatataatgtgccaggcatcattgtacatcctttggttatattaactcataaaatgttattatacccattttatagcttaggaaactgaatcttagacctattaagccattttccagccgtctcttagctgataactggcagctctaggattaaaatccagctatggtagccttcagaacctgtgttctagtacaaataaggccgtttcagagttcagcccctaacccaggaaccagcatggggggacaaagagcaatgtaatacaatgaaaaaacacagactttttggctcagtttgtaagctgaccctgacactttctgagtatgaattggaaagaaccttgacctctcagtcctagtttactcctccataaaatagataaggtaatccctaatgaaagggccattagaaggattatatatatagtatgtggtaaaagtagtttctaaattgtaaagaccaaaacagacgatgtattttgtgtatagaaagtttccctgggcctaatgggaggaaaagaccacagaggtggtgcttttactcagttattccccaatcttagacaaaagggaaatcagggtagaattgcaatcaattagagtcaagtgtgcagaggttttctccacacctctggagagagcctttgaattgtacctcttacgctcgcatctctagctgccattgaaaggttttgcatttcacagttggtgtgttaagcactggggctttatcaagatcttttaaaaattgattaagtgaccaggcttttacaattcctttgggagttcaataacaaagtaggtttcagagtaagaaatatattttctaattttcagccaatttttcccctttttaaacttcatctttattaatgatttggaagatggagaaaacagcatgttaattcacttagttatgagtttacaatgtgctgtgacagctaaaaaggccagaactattttgagacacaattgagggagcattgtatcatgggacagaatagtgattgtccctttttataggcctttacagagatggcttctggaatatagtatctagtttctggacacctccaagccagagagatatttagctcaattggaaaggattcagcacacatgattaaagatattaaagaaagcatatgtggaacattcttgctaccttgcccagtcttgtcccatcaaccctatcacttcataatgggggatagattgtagttggtttgtgaattacagcttagacatgttcccttgtcacttgttaaattcccactgttgcagataataatatttaacgtggaaggatactttaacattgacttatattctcataccctaatgatgtctgataacatacaatacatcaaagtaggttgaaaaagtgaatctaggctaggaagtttaagagaaatgatacaaggggaaaagggggctggttatttattgtacataattattcctgaacaaattcaactctaaaatagtaggtaggtctgttgagaaagactgtatctgcaaggttcagaagcattggagaaggcatttccaggcctccattacatggtgtggccatatagatgagaacataaattgagtcagtccaatacaactcactcacttcatagctagtgcttcttccaattgcaccatttactgaaatacccagatattggtccaataatggcagaagctgcctctacaacctaagaggctcacgggcatgaagctgtccttctcatgtatttgaaggaaggcaatccttgacctttaaggaaatggttcagtacaatctaacctaggccctggcttcctgaaggcagacaacacattgtggtttgttccccaccccctaaaatatgaaatgaatatgtgaattaattcgaattcttttgctctctgttctaaccctgagcactgcttttttcccttcctcagagccattcagcgctgacgtatgggtgatgatgtttgtgatgctgctcatcgtctcagccgtggctgtctttgtctttgagtacttcagccctgtgggttataacaggtgcctcgctgatggcagaggtaaggccggctggaaccgctgcacttccccagtttttttctccttattttcaaatctctggactcctcatttgttatctgcattttccctagcatatccatttctgaaaaggaaccctcaggtgaacatttctaagtcaccagcttggcgtctctttagaaataccccagttaagatgttagtttgaatctataggtctgctttatgcctggccccaagcctagtttcactcccaagtaaaggagaggaaaaactattggtagatatgggtatagcataaacatgtcacaggaaactattttgataaccttaggctgtgggcagtctgttggaacagatgtcgctaacaaggcagattgtacacacatgttaagaacaagaagaaatggattgccccaggatatatgcaggtggttgtggctggttgagttccccagtgccaaaggatcacaactgaggtaccagatctccaaagcatatgcccctggttcaacccccttgcccgagagtataaaagttgggtgttggaaataaaatgaatgggaaagaccaattctcactcatagctattattgggtatggtccaatttcctgggtaggtagacctagagatgtgagggctgcccatgtgtttgaggcatttatgacagtttttaaaagttcacatgatttctaaaggggaccatgggatccttgtaaataactcctctaaaacttcctgagaaccccaggattaagaaatattctgccttctctgagtcttctccattccagaatgtgagctctatcctagaattaaacctccaagagggaagattcttaaacctggctacacataagaatgatctatggggcatctaaaagacacaggtgcttggacctcattttctgattcactaagtctaggttggggcttagaccactgtatgtttcaaaatagtgtttctctacgttggttgcatgttaaaataaccagccccaccctacaccaatttaataagaatctctgagtatagggtttcaggcagcagtattttataaaatcttcctcatgcttctgttggattcacagtctaagctgtgaaacaacactttactgaagtatttccaagtgcagacctaccttttaatttggtttgtgtattctgaggtgggagttggggtgtctccatggcatggtacaatcaggggccttccacctgtgcttcatccagaagccatgacctatatcccagcctgtgtggcaccagtgagaagtggaacatctgggaatcacatgagtatatacttaggttggcaatgtcaagagctaaagtcagtgtgcattgcctctctcccttgaaaaaataacaggagccgaaaatccagatttgcaaagaaagctcagagcgagggcttacaattactcactttaccaaaggatgtttgtcttcacagaggaattcaacatggggccactttaaatatcaagtctccttagagcattttacaatttataaagctttgatttataaacaacgttttagttacacatctgttgcatgaaataaggtccacacgcacagatgtgtgtgcacagttacatatcaggttcaacatgagttgtccctgatgatttatttggctgagcagatgctatcaggatcacagattacatcataagacctgtgcaaatatgttgtaaaactgtgcaggcagatgttcatttctgcagtggaggggctacatggagattcagacaacaggcaagattttaccatcagcaaatagagattgcagtgaggtcacaatacatacatgggcagaagcccaagcactgtctatgcaaaggttaggtggggggaaatcaaagtcaaaagcagcttcctttctccccttagatgcaggtagccaggccaggattctatgacttcccctttggccttcctgatattcttttttttttttttttgagacagagtcttgctctgttgcccaggctggagtgcagtggcgcgatctcagctcactgcaagctccgcctcccgggttcacaccattctcctgcctcaggctcccgaatagctgggactacaggcgcccgccaccacgcccagctaattttttgtctttttagtagagacggggtttcaccgtgttagccaggatggtctcgatctcctgacctcgtgatccgcccacctcggcctcccaaagtgctgggattacaggcgtgagccaccatgcctggcctctgatattcttttacacgcaagcttctatgacaggaaaccagttgggaagtgttggcatcggagtaggatcagggttgtctttgaaacattgagtgctaagtgctagaagctaaagaaaaatcaggaaaaagtgcattctaagccatctagcatcagtataaacagacttggagagggtttatgaatggcagaaaacaatcttacccagttcttgctgatgtttttggaagttaaaatgcattcttggtagatacaaatataaaatttaggaaaaaatgacagacatgacccaagtgtgaccatagtgacatagttggcctgttttactcagttttgatgtaatcttgagagggtcttgtatatgggggcaggttgatggctcctccagaggggagtcatgactgttagttcaagaaagaccatcctacacacactccgggcttctggtttttctcctaaggaaccctctgcagccctcctgagagtccctggaaaagagagatacacactctcaaatttaaaagccgtctataaaagggcttggttttagcggaagggtttcctgctctgagcagggactcaccctgtgtatttgtaggtttcaacagaaccagccacaatggcttaactttcgtccttgtctttttgtcatgccagagcctggtggaccctctttcaccatcggcaaagctatttggttgctctggggtctggtgtttaacaactccgtacctgtgcagaacccaaaggggaccacctccaagatcatggtgtcagtgtgggccttctttgctgtcatcttcctggccagctacactgccaacttagctgccttcatgatccaagaggaatatgtggaccaggtttctggcctgagcgacaaaaaggtaagagactcatttgaaatctcccgtctttccctcaatcctgttctcagccatactcaaagttctcatgtacctgcttgtcttctaaatttttggaattgaccgttctttcttatgttttcttgtattggaacatgggagtagaagtcagtttccctactgaaataatatgacttcatgttggcctcctgattcgtgaaaagttatcactagtacaccctaggctgaaaataaggggcttggtatgttagcggctttctgagtgcatggtacctcttgttggatgtggttgggtggcctatctgcacagggctgcccatgtggggtgttattagaggaccgccgccgtgtacccacaccgaggagatgggcgcatgatggcctccttttcttcccagtggtgtttggctgtgggctctcccttggttccggtgcacactcgtgtttctggggctgagcaggaagaagcattgtgtcttgaagagaagtaactgctgtttaactggatgatttggatgattgcccctgtgtggtgctgatgaatgggctgcccccttactaattgcaggcctctgcgggcctatgcaattgagagagaagggaaagtgtctgctgttttccatcactgctggatgaggatgtacaaaacccattctaaatacatctgaccctccagtctgcctgaagcatcacattttccatgggagatctgtctcctgaaactatgtaaccaggactagggatgggagacactttcatggagtgtcccataaagcttatggccaaaataattttggagacttgcgcttacaacaaattttctactctatttccttaagatttagaaaatgtgatatttttccactcccacccccacccccccaggatgaagccatgagctgcagataggtgtgtcttcagaccaaatagtactttgcacatgggttagatttgcccaacctaaaaccctacacacttaagcaaatggtctgagaagaatgaaaaggaggagatattctcttcaggggctcagattctcatttttccttctacatctctacttatcaagaacattcaaaagcatgtggagaagataaatagtatcttgagaaaagatactatatatatttattatatatattttatatatttattatatataatatatattatatataatatatattatatattttatatattatatataatatatattatatatataatatataatatatattatatattttatatattatatataatatatattatatattttatattatatataatatatatttttatataatatatattatatattttatatattatatataatatatattttttatataatatatattatatattttatatatattttatatattatatatattttttatatatttattatatatattttttatatatatatatattttttttgagtgcatggtacctcctgttagatgtggttgggtggcctaaatgcacagggctgccagtgtggggtgttactagagggccgctgctgtgtacccacactgaggagatgggcacatcatggcccatggaaaatatatactccactgtgtttacccctttgtgttatctgtttctctgatttgtcttcctttttgctttattcttcttccttatttaaaaaaaaattctctctcttgtatttttttctctcttatttggaagcttttatttacttctctcatctcatgatttatgatacatttatttatatatcatccatgtattaacccatttttaaacccctctcttattgttccttcatcaacatctttcatcacgaccctaactaaaatctgagttgcacacctccttttccccccatttgcagccgctaccacaatcgccttttggtgactgtttctgtaacctggacagtaatagggtgaagaacaacctcagagctcaatacttggttgtggcttagggtaaggtggaccacgcccacctcctattgtttggatgtctgatccctttaaatctcatgttgaaatttgatccccagtgttgaaggtggggcctaatggccagtgtttgggtcacgggggtggatctctcatgaacagattagtggctcccttgggaggggtgggactgagtgagtttttgcttttttagttcccatgagaattcccccaacagctgattgttaaaaagagtctggcacctcccctctctcttgcttcctctcttgccatacgatctccgcacatgctggctcccctgccccttccaccatgagtggaagcagcctgaggatgtcaccatatgcccaaacttcaacttttccagacatcagaattgtgagccaactgaatctttctttttctttataaattacctagtctcaggtattcctctatagcaacataaaatgcactaacgcaccaccctaaaacatggatgttgcagaaacttgatgggccatgccccatgtgtagacttgtcagaggtatggcagaccatgtcttcacatgaggctgtggcagagaggtagtagactatgtaccacacagagtatagcagggccatgtcaccatgcatgacatggcaggggtgtagtgtatcatgtcctatgcatggttatagcactgtatggtgagatcatgtcaccgtgcatcaatatggcagagatgaggtgggtcacagaccttcttggctgttaagtggaggatctgcatgggtatcaaaatgcttccttcaaatgtctcaaaaattacttggcatactgcacttatctttctcttaccctcatgggccacgcagtaacaactgaatgtttttctgtttgaactaagcataactgagatggaggaagatagttttcttttccatgattttgaaataagtaccatttctaggcttcttaaagcggacaggatatgcacatgtctgtcctccataccgtgttcattatgttctaaaagttggatcccatcagtttgttttatagaatgaagacaggtgtgtgtgtgtgtgtgtgtgtgtgtgtgtgtcagagagagagagagagagagagagagagagactttcaagacctttgcaaataatttccactgtgaccccagctctgcagtctcattggccaatgcttgggttcctgcatctgatatcctgggtatccacaactgttcatctttttcaaccatacctctatctatgcatctgcccgggaggcttttttccccactttttcactcatcaaactcctactgaaacttcaaaacctagattagagatccctttatttgtggagctttccctagctcatctgggaaattagtcatttccctagctcatctgggaaattagtgctctattatggcaactattcaaatctttattataacacgtatcttccgcattctattacaataatctataggccaatacctgaccacctattcctctgtctgaccctgaactccacaaagtcaatgaccataagttgttcatcattaagacaaaaaaaaaaaagagtctgtggggagagaggaagagaggttgtatttacttaagagcccctggcaaaaacaacggacccagaatcacaggcaaagaaagcaacaagtcagcaagtgccccttaacagctgtttactttgtaaatggttttctgatacatttcagaactttgcagatgacaaaacagtaaagtgtaagcaccctaccagaatctgtcaacatgatttacataattataaaaaacatttaagtaactaatgactgcatatcagtgtcatggacagttatataaatcagaaagagagtttcctgaaaatatacttaaaatgttaaaattcttatagtcttacttacttacagtctaacacctaaagaaaacaaattattgggacagggtatggtaatgcatgagaggaagtatattctgtgaatttagaaaaagaataaagacattcaaacaataatgttgagaaaagaaatgagatgattttgaagattattttccaatgtgattagattttcatcaaggaagtaacatttaaaatggagaagggttcctaaacttgttttgactattacagatgatgtatcttccatataactcacatcaagtgataaatatcttggagcgatgatggaaagatatttgtagccattcgatttatagctttttaaaaagttatcttcagctttattgcagaaaaaaatgtactcagatttcatttgtgttaaggtagaaaacgagagttaaatttccatgaaaacctatttttgtactcctttatactggaaggcttccattttgcggtagcacattacagtgaattcagaattattccactacatgctgtacctaaatatgggtgcaagttcgaacattcagcaacccgactgtacgttccatcagctcccccagtgggaggagggtgtaagggagctagtgacatctttcttctcttaacaaagagcccacaatgcattctcatatttctcacccatccagatggatttctcattttgcagtctgccaaccatagtatgaaggaaaaagagcttggccagtgagggagggggacatatttgctgggcactaggtacattttgtatgctctgtgtatgctatttggatagtcttcacacaggtatgattattctcattttacaaataggaacaccgagactctggaaaactagtaacttccccaaagttatacattatcaagtgacagagccaaaatttgagtccctgtgtatttggctccaaaatcactctgccagggtgcttctcctgtagctaatctcagggaaagctgtgacatagataaggactggaattgacacccctgcccccactttcctatttaattccctatcctttaatgtaatgccttgattccacttaacagggcacattaacaccaccactactattactactactaataatgattatcattgttattattattaataataatataacttcagcgataacttcccaggtaagatttttttcagctcttacaagccaggcatcatgccaaatatatttcatagattatcttatataatggtgctattaatatctttatttgtagatgaggcaactgaagcttggtgaggttaaataatttgcccttatggtgttcctggctcactatagcccctgaacagtgtgccaccctgtttagaccctgatgctatttgatgctctttccagttattcacttttcttcctacattcctatctaccttatcaatcaaagcctaacaagttagatcctttccccctactaacatgtagctatctaattaattgagccataataattagatagatagtattgtaacatttgcactttatttaataagccttttagagacattattttaaatagagaagaatggtgatttccagtacttgggcaggctaatggccctcaaattgactttagcctgtgtatagagtgacccttagctttaagctactgttggatggtggagaatggtggcaccaggagtgagaagggacagttagggggtcagtggggtctggggtcagattggaggaagcccacagggaggtggaggctgctaaagtcacagaagtttgctgtttgaccattgggctctccagggtatctggctgcaaacgatttcacacgttcctaccaccattgtgacacatgcctgaaatatattttgcagctcttctcctcaaggaagtagaggagtttgattaactttcaaatgtcaaaaatgtgctcatctgcttaatgagggtagctatctttgcctgcaacactggaggtacaatcaggatggccacgtaacacctaaatgaataatgagtcttctgggtttccaagaagtcccatgggggtctggaagtcacttcatattcttttgggatataggaagggcatgacttttaaatcaatatgcaggcaagtaaataaatatgcgttctggaacaaatcagcctggtgataagcaaatttactccacaactaccctgaaatgttgagtggttgttgagcatgtgtgaggaaatggggccatgctttccactgcacaaatttattttcctgccctattaactttaggctggaagccagcaggagacagccaacctccagcccgatctgtcacacccttttcctggcccagaacatctcgctcagaccatggaatactgggctaaaaataacttaattgagaaagtagcagtcatgaccaactagccagggagctagtaatgagggcctgggttggacctctaggtagctgagcaaaatgtaagggtatgattcatgcatgggagtcctcttggcctgtcaggcaactattcttcttggagctactgatcaagagcagatctgaaaaatgtaaaactccccaaatcctgggagtgtctgaggtacagaatgcacatgagaggggggaggacacttgccttttgttctcttaattggcagagccagtctggccctttccatggactgctgtcccaagcgctgagcctccttcattcctgccagggtgacctccatccaaatgggtccagaacagatccctggggcttggctagccccaggtctgtccatcagggttggctacccccacttcttatctggcattatttaagaatgggtctgctatatgccccaacaggtatcccccaagtcctaattcctgaatccatctttactgagacaagagatccttaacttcagttcaacatcctgtggcttagtagtgggtcaccctccaagtcctgaggggcagatgacccggagttgatgactgggttcctagcaaggcttcacagttgccttttactccttccccttttgtggtccccttccccttgaacgaccctctttcccttgaacgaccacctgcttcttgccttcctatgacttctaacactgtattcctcacctctaagctctactaccttgttggggcctgaagtgggttgaattgtatcctcccaaagatatagccacatcctaacccctagaacctacaaacattgaccttgtttagaaaaaaaaaaaaaatctttgcaaatgtaattaagttaaagatctcaaaatgagatcatcctggactatccaggtagacactaaatccaaagacaattgttcttataagaaaaaggcagacacagatttgacacagaaggggagaaaacacacagatgagaagaccatatgaagatggaagcagacacaggagtgatgcagccacaggaagacatggagccaccagaagccgaaagaggcaagatatggattctcccctagaacctttggaagaagcactgcccagctaacaccttgttttggaacttctggccttcagaactatgtgagaataagcttctgttcgtggctattttttatggctgccacagggacctaatacaaggccttcacaacttcttctgtaatctgcactttgagctcattgcatcctttagacttcagtgcttctcctctttgtcccgatttgcattgtcagtctcccagccccatcctttcaaagtgagtatttcttgcagtgggatcagattcagttcccctctcctttgcctggaagaatggatccagtttgcactgaagctttgcagagacatgctttataggcagtcttctccttgctggttaattttagggagacaatacaaaacctgagtgtcattgtgtgctcccttttgctgtgtccttgagccggattaatgttagtttctcacaatacgtactacactgcttatgtgcacacttccccactaccttctacgaggccttttagtagtgatgtccttatcgaagggaattgaggacatgtttctgtgagatgtatcattttcacaattcctttgtgcagaaaaacactaatgcactcttctcatattctagactgtgccatgttgtttaaatcagagaactggaagatactttatttgatcatcaggcacagggaactcttttctcatcaaaagcaaacaggtgtcctctctcttcttgtagccttatcctccttgttacacagaaatgtacacacacacacacacacatgcacacacacatccctaccctccaagactacataaaggtaccaagataactggataaatagtaacttagcactcacaaagctgcacaaggaacacaggtttcccatgtgcgtagaagacttactaaatagatatcagaaagtttgtctttcttacctgggtaaagaatttggctttgtctcattctgctgatattagtagactcatctttttgtgaaacacaaaaatgaaatgaaggaaggagaaggaaggagacagatggagagagtatgaggggaaagaggaaggaaggaagggagggagggaggtaatcagaagccaacgctgtcctggatctgctctgtattacccttcttagaaaggtatccctatgcaagatattagaggaccagaggcttcctggaactacgactttttaatgcaactatgcaaactagcatgagtctgaattcacagttttgtcacctgcattgaattgaactaggcccaaaattaaagccaaaaataggcaacaaacaattttaattaacaaaaatcaaagtacacagcatgggatgttgtcctttcagatttggaatgttctggatgtgggagaggctagtgagcacttcttttaactgttggaatcattgaatttgtctatagcttccctatgtggcctctcccagtcagactgactctcccaggtggggaggagcaggtggctctgaggattcccaccaaatttcaaatctatttacagcctagtctctgtttctataagagagctattctatttagctaactgttgaaggcagttgctttgttcgaaagtttagttacataaaataggagagttccccaacattcttttctgattaataacaaaaaaattatcaatgttttagtacggggagggctaatcttttataagttcactaaattgtgggttgtgggttgagaatttattaagaattaatgtttcacttctgaacaactaagttcgagtcctttgagacaaattaatgcagcatggaaatttatatgtggccaaaagcatcaagcctagaatgagtcaggttttaaagatgtcagaattatattcacaatgaaattgtggccagggctgctctgggcttttgtgtttcagccttgttgcctccagctgtaatggtggcaagagtggaaaaggtgtgcagcctgctatatttttggaacctttcggcctagctgggcatatgctagggctgatgggggcctgagactccctgaggctagggaagcccaaccatttagtttacgattccacatcgagatttcctgtccagcatgggtcacagagagccatttaaagaccaagtggctgacactctgaaaacactatagtctcggatgtttcctctcctattttactccagtgccactcaggtgatggctttgatcgagagcatcaggagcattggcttcaggccaacatgatcctgagaatggccagagtggagagaagaaaacgagcaggcaagccgactccctcagcacggagcagcttggattgtcagccatcactccaggaggaagtcaggaggaggaggctcaagacctcgggtcctcactttaaaaagcacatggctagtcagtaccagaagttgtttctgtttgggagtgcacaggaaggagtagctgccagggaagtggtggggtagaacagttcattgatatcaaaattatctggagaaccctttcaaaccaagtaggactctctccaaccagctggaaataaaagtacaggtgccaaaagctcccacctgtgtggcactactctgccaaggaggtagccaggaaatcaaaagtaagaaaaggattgtgagagaaaactactttggggtggtggagggggtggggtagctgttggaaggctgtggaattcttttttctgtactttttaacctactgaagctgctttgagggtgtcatctagagagcttggtatccaccccctgcagttagaatggagaagggctggcatttgacccatacctgagaagactgaaggtgacaggtcttggtgagaactggtccctggctggtgggccatactccccacaatggccagatagatctgtttctcaagaccagatgaggccatatgggaaggagggagtcagtctgggcctgaggtcgagggaggtgtttttcaaggctccctgcccaaaggcctttcttcccaagataaggcaactgcaacagatagagtcaggaggggtgctgtccagtggaaaagctggagggactgatgtgagtgaccagctgcactgaggttggtccaatgttcttcctgagagcatctctggggagcccagaacttgcctggcaaggaggacatctgccatgcctagggagtggcaatgccagaccactgcggtgccagccaaggaagtgctttcctgcctctgcatctcctcttttccctgacaccactgccttccaccccaccctagagtgggaggagaacaactagaatgaatgcaggatctgtaagagctggcatcacgttgagttttatttcttggctagatgatagccactgggattcctggggccaaacctgcctatttctctctgcccttattattgaactatgtaatgaacatatattatgtgccaagcctactattaaactcttcacatatggttctactgttaccgatggagggtcttgaccagaagttgtccaggtccttggtattttgaacaaagaactgaacaaagcacacaaagtaaccgagtaatgaaacacaggaaccaagcagcaaaagcaggaatttatgaaagcgagaaagcactctgcctggtgggagtgggcccaagcaagtggctcaagggcctggttacaaagttttctgggttttaagcaccccatttgaggttcctattggctaccccttgtctggatgaaggatttggtctgtggctaactaaagactgaggtgaattggtgccctatgcagataaagggatggtccccgcttggcccagggccaatccaaggcactctcccttttccatctgagacttggtggaaggaggaggttggtagggagaatagcctttgatcctttgctactgggaatgggagatggggtttttcctttcggtttagcttcaggaagtttgcgttaattggctttaggttccctgcccccaggcccaggttttttctttttgatccagctttgggaagtcagtgcaaattggccttagattccgtgcctccagaccttgatgtttttccttgattcagccttaagttcccttcctccagaccctattctcctgcctcactacttttaatctttatgtccaccctttgagatcaccattattaacatcgttttacagatgaggagagtcatctaaggattaagcaaattcacctaagtcacacaactagaaagtgagggttccaggatttgatccagagagctgaccccacagcctgcatctgcccctgtgatactgcctaccagagccctgtgtcttctttgtgtggacacaggaaagtagggcatgcttctagaggcattggcctgaggcaacagaatctaataaagcctctgtcctggggaccttctctggcctggcttcttggattctcaaaggagtgataatgggactccagccagagaccactcattatccagctgtgagtgcacaggaaccttgaagagaccttgttcattctaaccaacagtatttccagcgaagtttgttttcttcatttgtgcacatacagccccttgcacatttaagaaccacttatataatgagagttgactggatgaatgaatcaaaaagacatcgaatattattgggtgtcatgttttctctctgctaggcagtaaccagtgtgtttacttaatccagctacaaaggaaaagatcccactctcagcaaccttccctttatgggaaaagtagaaaaggcagagagggaagaaatggagtggagggaaggacaccctacttcacccctccatcctcatctcagaagggaaatagagcaagagcagtgtttagtttctgaagtacttgtgacaagaagaccatgagtagcttaaggctataaaccaccttggtattaatttcctaaatgcttaattctgtgaaactcctctacacatctcccagcttatcactagcaccacagttttctgagtaaagtattagccagctgtgtttcttgcaagaactgattgccaacagaccctgaggcagctgggactccaccttttttggactgggtacaaaagagatgttgagctgggtgttatcctggtactgaagaaagaatactgtgatttctaatgatgtctgtgagtggcctcaaatacaaattgaacaagatggctaacagcattgtgtcatgaaggactctgcagctgaggacctctggggttcaggaacctctgggaagtgagccttttttttttttcttacagaaaaaaaatgcacttgaacacacaaggttattaactcacatgcctttacatgacacacccacccatccctgcaaacacaccagcacatacaccacatagggtacagatgtggttttgacttggagcactgagcaattttctgcttttctttttatccttttaaaagcacaccaaattaattgtggccaactacctataaatccctttctctctgccaatcagggctgcctgaacaggcaagaggcgctctcacctgcctcgttatgcaaattgtattcaagtgctgaagaacaatgcagccttcagcactgcaatgattccaggttgctaatgaggagaggctgctgctagaggaattgttttaaccctctgatgctgaggcaagaaggctgagaaggcatcaagtggagatggaggcagagtcaaagtcaatgccagttctcagcaccagacagggtgctcccagagcaccattacctggtgcaacttggcccctgatatagaaggtcacccccgggtctgacataatttgggataatttggagtccaaacagtatgggcagaatagcttgatttcttaaatatccctgtggtctgacaaccataagtacatttttcaggttatggtggacatctgcaagcacagggtctggcatggtcacaaatgtatcgatcctcagaatacctgtagtcaagggcaggcaggatccaccaggcaaagggcatgagaacgatcaacacacacacacaggaagaaatcaatggacactaagacctcacatcatgagattagtttgaaaaagacctgtaccattcagccattcattcattcaggacctgctctatgtggagcaagaattatttcattctccagtaatcacagttgtcaggacttatttctctcttgactgcttcaccctgttaccttgccccaacatttcagaatctcctcttggaatttcaatctcacctctcaaacccaggtaatcaaaaaggggcttttaacacaattatgtaattgtcatgctgggactctgtgtgagccagacagtttatgcagtagtaaggggcatttccgctaggcagctgtggtagcattgccttggaatggggcaaaaaggaatttggtattgggaagcacagcagttctccagctccttttgaagaaagtctttataatgcaacttcaactctcagttggaaatgccctgaaatcacacgttatccaatacacccatgctccaagatgagtttccccaggttacagatggcctagacaagcagccactccacttctgcccttccacttggcactactggcacctccatgtgagcggctttttttttttttaatactttaagttctagggtacatgtgcagaatgtgcgggtttgttacatagatatacacatgccatggtggtttgctgcacccatcaacctgtcatctacattaggtatttctcctaatgctatccttcccctagccccccacccccttacaggccccagtgtgtgatgttcccctccctgtgtccgtgtgttctcattgctcaactcccacttatgaatgagaacatgtgatatttggttttctgtgcttgtgttagtttgctgcgaatgatggtttccagcttcttccatgtccctgcaaaggacatgaactgatccttttttatggctgcatagtattccatggtatatatgtgccacatgttcttaatccagtctatcattgatgggcatttgggtcagttccaagtctttgctattgtgaacagtgccacaataaacataggtgtgcatgtgtctttatagtagaaagatttataatcctttgggtatatacccagtaatgggattgctgggtcaaatggtatttctagttctagatccttgaggaattgccacactgtcttccacagtggttgaactaatttacactcccaccaacagtgtaaaagccttcctatttctccacatcctctccagcatctgttgtttcctgactttttaataatcaccattctaactggcatgagatggtatctcattgtggttttgatttgcatttctctaatgaccagtgatgatgagctttttttcataagtttgttggctgcataaatgtcttcttttaataagtgtctgttcatatccttcacccactttttgatggtgttgtttgttttcttgtaaatttaagtgctttgtagattctggatattaggcctttgtcagatggacagattgccaaaattttccccattctgtaggttgccagttcactctgatgatagtttattttgctgtgcagaagctctttagtttaatcagatcccatttgtcaattttggcttttggtgttttagtcatgaagtctttgcccatgcctatgttctgagtggtattgcctaggttttcttctagggtttttatggtttttggtcttacatttaagtcattaagccatcttgagttaatttttatataaggtgtaaggaagggatccagtttcagctttctgcatatggctagccacttttcccaacaccatttattaaatagggaatcctttccccattgcttgatttttgtcaggtttgtcaaatatcagatggttgtagatgtgtggtgttatttctgaggcctctgttctgttccattggtctatatatctgttttggtaccagtaccatgctgtttttgttactgtaggcttgtagtatagtttgaagtcaggtagcatgatgcctccagctttgttctttttgcttaggattgttttggctatgtgggctcttttggttccacatgaaatttaaagtagttttttccaattctgtgaagaaagtcaatggtagcttgatcgggatagcactgaatgtataaattactttggacagaatggccgttctgatgatattgattcttcctatccacattatccttacagcatctgaaaaattagtggttcagtaaagaaggaggaatgacttaaaatagttcccaaggcaatctgtaaactgggccttcatgacccatgtaaagtggccttcatgaccactacatttttttagcatgcttttatgtatttaaacttccagtttaaccctttatataaacaacaaaaacaattttggggaagttgaatgcttgtttaatcacacatcagtaagacattgttttcaaattatcttccttttaacacctagatgtcatcacttagaccgaaagaacagggcttttgattttgtggatgtgaaaatagggggtgtcaggcttggatgccccaaaaggaggttaggaaagcaccagagctcagcaagtggagtacaggtatagataaatgaagtatgggggccagctctgaacccaagcaaatgcaattcattttcctttcctccaatacttcattacccatttctggcctttgtcacccccatgtcatgggtgcaactggctagggctacatcacaggtggtaaaagaatttaccaagacagttgtgggtaaagaaaggcagatttattagagaaactaagaaaggtgcattgcaagagtgcaacaggcagtacagcagagagaagcctgtctgccaagatgcaggggatggaggggagttttatagggtcatgctggaaaggctactgcagataggttcatgctgctggggctgtttggaaggaggtatttgggaacaggatgtttgtggttagccatttcttacaacaatagcttgttagccacttcttagaacaatggctctcttctaccctcattcctgttcctgccagcgagggcctctttcttgtttctatcaacttatcaagactccacaccccagacacccacccctgtcctcctacaatggcccaaacacacccgtcaccctccactagaatcattgagcaagtgctcatttccttcactgaatcataagctccttgaggcaagagacatgctttcaataattatgtctttccagctcctgagacagtacctggtacattgtagaagtttattaaatgagtaaatgttccaagaacataagctaataatattaacacaaaagttctgctctcttttggattaaattggctttaatgagccaaccacttatagtattgtttcttgggggcagcatatttctgtttgtgagcagctgatttataaatgaactattgaggacaatgtgttcataggttggagtctgcctattgaaaattgcagtccaaagccaaaaatatattaacctttgtattatgtgttcttttgcaatattagcaaccatggccctcattcatggtaatcacatgaaaccacatcaatagttacagtctcagagagcatacctgtcattagtgactgctgggtggcattctccaggctagatgctttacattctttgactcatttgccatctcccacttttaggtagatgctacctctactgtgcagtagagaaaactaagacaagaagctatgtgatctggctaggttcctaaacccttctcatgcctcagtttcctaatgtgtagaatggggattaaaatgttacctactttatagctgctgtgctgatgaaagagttactctttgtaaagcttagaagagtgcctcaagcatgctaaatcctcaataaatattagtggtcacgtcctacatccacccagggttcgctcctaaacccagctcacaaagcccacgctgtttctagcagatgattaacatgtgccctgaaagccacaaactgctacaaatacacccaagagcccaccactcagccctccttccaccctgcttgccccaggcactcacttgtttcagtgagattttgaggtgggagtaggagggctggtggagggaaggtcaaacgtcagggctaaaaaagatgtggaaggggcagcaggcgagttgcagtgcttagaccccttgaaactagctctggctccgaggatgcctggatgaagagcatcttcatggccctctcagacaagaggtgcctagtacctctttgcagccaaccttgtgggtcttttgaaagcatgctcccagcatcctcctaggcacatagtaagggctcagtgagcatttctgaatctgtgtcttttgcccatctctgtggtagaaaacaatgacttcaagagtgagcttcaactatgattccacctgactactgggctctaccccaaggaaatggtttctcacaggagtgggcaaattataaaactggtctttccccagcaattccattgccgggtatatgcccaaaggattataaatcattctactataaagacacatgcacacatatgtttattgcagcactatttacaatagcaaagacttggaaccaacctaaatgcccatcaatgatagactggataaagaaaatgtggcacttacacaccatggaatactatgcagccataaaaaaaatgagttcatgtcctttgcagggacatggataaagctggaagccatcattctcaacaaactagtgagaaactaacacaggaacagaaaaccaaacaccacgtgttctcattcataagtaggaattaagcaatgagaacacatggacacagggaggggaacatcacacaccagcacctgtcgggagtggggggctaggggagggagagcattaggaaaaatacctaatgcatgcggggcttaaaacctagatggggaattgataggtggagcaaaccaccgtggtacgtgtatacctatgtaacaaacctgcacgttctacacatgtatcccagaacttaaaataaaataaataaataaaaatttaaaaactaggtctttcttaaggccttccctgcttgcatggcatatattgccaaagaattttctgttccttcagacactcagaaaaagtaaacctaatttattctacttcaagctctctcagagacttagagaagagccttagtttcattgcaaattattgatgcagccagataatttataacatttctaagtttttaattaatacccattttgactactgtgtttagcaataaagttgtttttattgccatagttgatagtctatcataatctgtccactattaaaggaaatactctctctgaaggccccttgccatttggaaaattcatagtaatttcaagttagatgtgagtttgggagaggccgagtcccagtggttttagttcctgaagctcctcttctccattcccagcccagagagcttgtcttccaacctctataccacatagggtttttcctggcaaattcattcttaaagcatactagctattaatgtgacttatcctgtgtatctgttagttgcaagtagaatgtaatgatgttctctaaatgagggatacaagtcagtttcattgcttttcagtctcaccgcctacttttcatttattcattcatcagatagattctaaatactacatagcacttactggaatagagtacaggaaaatcagaacagctctgcataaacataatctctgatctttttgttggtactaaggttagtgtccaaccacctagtctatctcaggagtccttagcatctgccagactgcctatagctaaggcctagaggccctcagaatagaaaagatcagtagctctgttttgttatctcaaagtctctagaaactgccaccctcaatcaccttgtaagccccttgttcaacttggattctacctgttaccaaaatcctgctcctgtcctcatttctttgaattaactaaagcctctgttgtatcatctacctggcttttaaaagttactatatcctctgcatttaaaataatacctagtatataacaacaattagcttaatcgttattgaatagttactagttaatctttgaatagagctaacagatttagcaaataagaatacaggacaccgagttaaatgtgaatttcaggtaaattgtgaatatgattttagtataagtatgtcccaaaatgtcatggaaaccctaccttgtgagacgttggagatatgctgaaacagccctactctcagagtctagtgagggaggcagacacttcgttcttaaaaaataggatggtaaatacaacagaggaatttcctcttttgctcctttcaaggctaaatatagtcttaatcttttacaagaagacttgctcccctcacttttaatcatttctgaaccttctgctgtgagttatggaagagaacacacggtggtcagaagccctcctactggtgtataacgcagcctgaccacatccattccacatattgctctttagcgtccagtgacaggctctttattttaaaaaagcagcactgcattatgtatgcatgcagtatgtggtcaggtagaactgcatgatttttcttgagcatgcatttgacaaagcctgttcctgtcccttctagttctagtgcagtgtggttttacatcctgtaagaattattttgtatgcttcctaatttaacttcatccttttaatatcttcttttgtcaggccagacttactgttttgatgtttaattctatttctcaagtagccatccatccaatccaatttgatgcctacagcaggtttaaagagcaggttttttcatcctgtcacttaagttattaaagaaaacaagacccttccctgtgtgtttaataagttgccccacactcccaacaactggtcatgtctatcctttcactaagtatctcacctgcctagtgatggagcctcttatttgaaagagaaacgttttattttacagcattctttgctgtaggttagaaacattttccatttgttaattagctcctgccttggaatttcaagaattttgaagtaggctaccttctctgtaatccattgacaaagagaacatgagatgcacatttcagaccatgaaaaggattcagtggcctggtctcatgatagaattatcatggagttcaataagaccatttgtgagtaacttcccactaggtaggtgaggaagtatcccaattagtgagtctgtttccctctaatttgcatgtttaaactatattaaggctggtgcaaaagtaatcgcggtttttgccattcggttttgtcattaaaaaataattacttttaatggcaaaaaccacaattacttttgcaccaaccaaacaggtgtgaaattgactcatcgagaatatttccccaaatatctgttacaaatcaaaggcaagctattataccagtaatactatttcttcagcccatttgcttactctagaaaaagtgtctgctccaagcctgggatgaaacaggacttctgattttaagtggaaaaaataaatgttaatatgtttttccgacataaactcgaagttgttcttctgaaaattcagctgggtgtggtggctcatgcctataatcccagcactttgggaggttgaggtgagaagatcacttgagcccaggagtttgagaccaggctgggcaacaagacaaatatctgtctttacaaaaaaattaaaaattagctgggcatggtggaaagcacctgtagtcccagctacttgggaggctgaggtgggaagatcgcttgagcccaggttaaggcttcagtgagctgtgattgtgccactgcactccagcctgggcaacagagcaagaccctatctcaaaaacaaaaacaatacaaaaaaaaaaaaaagaaataaaaagaaaagaaaagaaaatgtacatcaggctagtggggctagactcagagaggaagatgcttacgagtggtatattgttaaagacaagggtttccagggaatgaccagtctaagttcaggccaccagatgagtatctgatctaaaatttggaagaggatctaaagaaagtttactcttctctgtccttccatctttttatatgttaatagaatttatatgttgtatggtgtgatatattaatatttaacatatttataatatttaattgtctcttcatactagactgtaaactcaatgaaggcaagaatttgtctgttttgttcactaatggatctgcagtaattaaaatagggtctcgtacatataggtgctcacatattaatagatgaattaattaaccaactagtcaatgaatgaatgaataagaagacagttatgtaattcatatagtgtccacagcataaggcagtacttttcactctttattagccatgtgaatttgagaacagtgaaagatagtttcatgaccaatggttgagggggaaggaagagagggtaatgtagataagaaatatttgacatttagaatcccagatagaattttctcaccttgtggtttctatgcctgtcacaccatctaaatcgggcaggtatttcagaagagaactgagtaagtgaggtctccaactgtgctgctatgtggcttgtcggatcttaaattataaagttctttcaggacctatttggcaatgacttcttcaaagcccctgattattcctcggctcctgtgtgagacaggcacaggagtcccctccttgtatgcatgtgttaagcctgccctgttctttgaatggtgaggcatcggcttcccagtcagccaagtgtttgctgagaactttctattttcataggaaaatatcgcttctgtaacaaaaagtaaccaaccctaaaataactatgtccccttgccacttttagaggggaaaagatataatgataacaaagaaagcttatataaagaaattattaaaagtaatgacagtttctaggatattcctggaataagtacatagtaaacataatgtcctaaaccatgtatggtcttttgtgtcttaatttctgtatatcatttacctccctgtatcatgacacatagcagatgctcactgaatatgtttgaatgactatagtttagaatgattttcatcaaaagggttgaaagtaagttttttggcttaacccttagtcaactggaaaaattgaacttcatttttctaccaacatggttattgatatttcacttttgtagcagtcaccttataataattatgtttgcattataattggaggtccattaaggacaactgaagtacactggcatcccattagtcctaaaagcctgagacatggaaatgtctgccgtatcttgctgtcgactgttcagggcagctcctggtgcagagtaggtactcaatacatgtgtggagactaaattaaaaacaaaagagatggagacagaagcagacaatggctgtttggtcttcgataggtaatgaatttcccaggcctctgtttcctcctctgtacaggcagaaagttgctcaactggcatttctcaaactgtttcatagcctatgagtgttctgggaaacataatggctattcttgagaaaaagaaatccatgggaaaataagtttggggaaatgctgtgtcagggttacataagtttctttaccaaaggattgttcgagtcctctcctgtgatggtccgttgtgaaccccgaggggcatgcagtgtgcgtggtgggatcgccaggctgcatcccaatactaacattccataaaccggagtgtccctcgcatagggctgactttattgaccaaaggaagaagctctgctgggctgtaagtgggtcacaatgtgacagtaagtacacatgctggcatttccgtgcctcaatttggaactgacagatctgattgattgccaggagggcagagacacacctgtccccctgccttgcctgtcactggatcctcactcaccctggcctccgcctggcggaggtctttgacatttccgccccaccccagcttcatgactctgaagatgctgataccgtattagaacctcaggtgattgtgctaataactggagaaccctaaattcattgggaatcttgcatgtggaaatcttggtagtcttctttatcttctttatctcctccaaaattttatgagctgctgaagctcctggtacaacttcagaatcccagtttccatggtgaatccatctgtcttctttacttgaaagcttctttaaaggccatttctctttgctagcacccacagcttttataaaatatctggaacaatcccttgtaccctcccaagttggtctgtgaggtagagtgcagtggacagtaataacacctctttgtaacaatcttgtgtaagaataggttgaaggagctcaacgaaggccacctgtcacacacaggatgacttaaggataaaactcaaatgcctctgtccttatgcctctgtttcacttcatctccatgttatcataatcatctctaactctgtcacatttttggtgccaaagaaatattcatatgcattgtcaagtcctaagtctgacaggctcttgcgggatttcagatctgatatattttgtgaaggaaaaatggagaaagtgccaggaaagatgtccttgactggcattaggacacattaactccttattcaccagagatgctaggcttgccctagatctgaggaatgttaatgctcaactgtgtgttgcatgataatgtatcaacagctaaatagtgcactttgaatggagtttttcatataataaatatatccacatgtgcgattcaattcattcattctttaaatcactcattcattcatattgagagcttactaagtgttggatgcttttctaggcactagagatacagcagtgatcaaaacagaccaaaactgtgtccattatattacattctaaggaggaaagggcagaaaataaaaaggcaattaagtctggcccaaagttagtgagggatcaatatatgtggatatccagggcttttggggcagagaagagcatgtgagggtaggagcttgcctggtgagttttagaaactgcgaggaagccagtgtggctcctgaggagtgggtgagggaggagagtgggagagaaggtggtggggatgaggctgactctgccgcttcctctccttcgttcttctgaatgtataggcagacttggattcagtcaaggcttccactctgatgtctttctttttcatttatccctcccattattttccctctgaaaatagtccaggctcttagtagttttccagtaaacgtcccttctctaacctctctgttcttcgagccatgctgctttagctgaacaatagctacacctgagcactgtggggttcacagtgtccttcctcagtctgaccattcggtgtgctccatgggatggtttctatctaggcgccaaacattcctcccaacgtcagtgcagatgccatgctcacgtcccagtgcttcttttctcatgctatttcgcttgccccatcaccctccccagacctctttgcctggataaacttggccaatctggaggagttggctccatctctgcctgctctgtgcagcctccccaaccatatccttttgtaatgattttcactccctctaaacttccgtagcccttcctttccttacctcccattggataggcatactaattcaggcactggattccttaatctgtacattttctgagcatccattctatttgcatagagccctgtggtgtgttttacagttaaatatgagtatcctgcatttgaatccttgctctgatagtttctagctgtatggccttattcaaattacttactgtctgtgcattagtttccctgtccattaaatggagataataatgcctacctcatagcatcaatgagaggatcaatgagttactatacgtaaattatgtgacacatggtgagtgctgtagaagcattagctgctgctggaattatataattatcatcatcattatttccagctaaactgtaatggtagggattgtatctgttgcctcattttatttcagagctcagtggcttatatgtggtttatgccctttaaatgtgtgctactgatgtgatattttatggccagacacaagactttgccaaacacttaaaacctcaaggtgcaggttatgatatgttaaagttaatatagttaatataggaataaacccactttcttggctctgctaactcagggaccaagcctcagctagctaacatgccattatctgattttatgaaatatttcaggaaatattaaggcttatgtatccaaattttataaaatacaaaagaagtgactgccttattgcattaaaaccatcgttgcgaggaaaactggtaattaactaaattccaggaatctgaagaactggtgttttatttgctgcaagcttttgtttcggctccagcaggagggtgatgacaggagaataagttccagtcctcaccacccccacccttctaagacctattatagaaccccagctccacgttgagttcagagaggcacaaaattccttccccagcagcacagcatccagagctgtgaagatacagcctcgaatgacagcacagccagaggcaggagaaaggccacttaccagccttctcacatccaagtgcaggtctcttcatatgtaaacttaagggtgtttgccactgtaggcaattatagcactaatgttaataataagaggaaaacaagcagaaacaattaaggtgttgaatgcttattatatgccaactccctttttggcagtagcaaaatgtcgtcagattcatcaggggcccaggaagagaacagagttaatttgggcaattttcctatataccggtagcttctaactacattctgcaatattattgtttccataattcagccatgccttttgaatgaatttgaacaatattctctccaatgaacactttataatgaaatataacaataattatttattcctcttacctccattccagattctttcatggaggtgaagggtttaactttctaatctgtcaccatatccacagccagtttgttttaggggtagggtcttggggggccactccaggccccatgttttgagatggaggatttgtagtgagatgctataccttatttctccttttggaacattgttaaaattcagtttcaaagctaagtggcttgtttattgagtcacacagttaataagtagtagagctcagatttgaacttagatctttgagcccataacccatgtgtttacttacgttttatcaataaattgtctttttttttttttttttgagacaaagtctcactctgtcacccagggtggagtgcagtgacacgattttggctcactgcaacctctgcctcttgagttcaagcaatcctcctgcctcagcctcccgagtagctgggactacaggcatgcgccaccacacctggctaatttttgtatttttagtaaagataggattttgccatgttgtccaggctggtctcaaactcctgacttcaggtgatccacctacctcagcttcccaaagtgttgggattataggtgtgagccaccatgcctggctaaaattgtcttttcactgtaagcacagattacctccttttcacatctgtcccaagcacttatgggccatggaacagtgaaggagctcatgctctcagaaagtctactccttgtgtggtcacctgaccttcttcttctcccactgggcccgacaagggattatggtagaagaggagagagggtgcttcctgcagccacttcctcccctctccagatgctgcccagagtctggaatcacacatacatatcccttcaccctaattgggccatagggtattattatggaagatttagtgatggaaaacatggtttggtgcaacacccctgggctaaggaagataatgtcagtttctgtacttgcttgatagttcctggaaaaactgagaagatcaaaagatagaagagctgtaaaaaactttgggagcatggggcatatgactcatccctcccacccctgaatatttaccttagaaaaatgaaaacatgttcactcaaaaacctgtacatgaatgtttacagctgctctattcataattatctgaaagtaactcaaatgtccttcaatagataaatggatcaactggtgcattcacataatggaatactactcagcaataagaaggaatgacctacagatacatgcaaaggcctggagatgaatctcaaaggcattatcataagtaaaaaagccagtctcaaaaggttatgtactacaggattccatttatatgacgttttagaaaaggcaaaactatgggatagagtggctggaggttaagagcaaagggagtgtgtgacttgaaaggagtggcaccagggagctttttgagaaatggaattgttttgtgtcttgattgtggcggtgactgcaagattccatacctggttaaaattcatgacaataaaagtcaataatttaaaagtactattaaaatataaaatagggtaatgacaataataacaggagggtgctgagtaggtaaaaatgtggtgtcttcagaattctgatgtgctgccacctcctcataattagcccaggcccaaagccattcacatctcctaagcctttcccactttttctcttgggtgcctggaagggctgagtggcatttgggcattgattctttttgtgatgcaaatgtaaaatcagaagtaatggaatgaatatttatgtgtaggattgtcaagctttgaagacaaaagcccccagattctatatctcatatggatggatccctgcaaataggatgtgcaatatccgcctctgcaaggtcacagcactggtttgtcctaatctgcatatgctgattggacacagactgaatgagtagagccatttttcagggaagccaactacccaagaaggcagttcctcaccatcctcttcattttaacagagctgctttcatttatgtgctgttattcaccggatctgactctgattattgtccttgggactgggtgacagctgatcaggagatggccttgactggtggtcagaacgaccactgctttgacaccatcagtatttaggacattcttggttttgttttcagaatctgctcctctcctggtgccaggaccttaaagacttctcaacaagtatgtttcttcattctcaccctggaagctaaccaggttggaggagtcttaaagcagagagttcctctggtgtaaattgatgttaacgccccatcgccacccttccaaagccaatccatcctccctgccagcttcaattcagcctccttctagaagcctttcaggaaatttatatgtcaatggcgtgcacctctgtggtcttgtatgttagctagtagtgtagggaaatatctgacaatgcgtctgttccttcttatccgactgtagcacccataccctcaccagagctcagggcctcttcagctcttgtctctccatcttactcctttcaacctgttctgcacaccagcacctggtgactttttctaacacaaaaacccaatcttgtcattctggcagagttcttcagttgcttccaatggcgatgatgaagatgatgatgacaatgatgatgatagtaataatgatagtaacaatagctaacatagtgtatttatcagccaggcactgtgccaatactttgcccagattgactggttgaatacttaaactttatgaggtaggtgctattagcagcccattgtacaaatgtagaaactggggcacagataagttaagtgagttgatcaaggtcacacagctatcaagtggcatagctgggatctgaatcaggcagcttaactccagaagctctgctgtttctcatcccttatattatgaactctaaactcctttgcacagaattcaactttctttgtgatccaggccctgcttccttcttcagctgtgtcaacctcctgtcaccatggccatacctgctaggctctggcaacaataagctgctcgtggtctctgatcatgcccaatctttctcaccaccttgtgtctttgaacagacactcgtctctatctagaaaccattttgctcctcttgtttaaatggttaagtcttagccccagtgcacaggctctgggacaccatcgagacagcccccttgttctgttctctcactgctgcatgggcacagctgctcatagcacccgccacattatttatagcccctggtcacaccaagcttgttcccccatgtcagaacctttgcatttgctgtttcctgagcctgatacattttcccccttgtctttgtatgtctggttctttcttattattcaggtctcggttcagatgccaccttctcagagaggccttttcaggacagccagtctaaacttgttctcctaccaatcactctttatcctattatgctgtttcaatttcttcctagcacttctttttcactatttgaaattatctgtgtttccgtcacctattgctacacagcaaactagcccaacacttagtggcttaaagcaagaatattttattatattttactggtttgtgggtcagatatttgggtagggcttgcctgagtgattcttctacttcatgtagcatgactgatattcagtgggaggctgggctggagagtccataatggctttactctaatgcctggctctgactggaatgggtagaagtccagggctcagttaggactggagatgggagcacctataggtggaatctccggcatggtggcctcagggtttttggacttctgacatggtgcaccgattctctcagagcgaggtttccaaaggccaaggtggaagctgcaaatcttcttatgcccttgtctcagcaatcccacaatgttacttctgtcaacttctactggttaagcaggtcacctaggtcagctaagaatcaaggtagggaggggacatggacctgtttgtcatagagtggcaaataatttctggcagactttagtcaaccgaatgggaggctgaggtaggaggattgcttgaggctgggagtttaataccaacttttacaacatggagataccttatctctacaaaagattgtttagaaattttaaaaataaaaaacaggcttactgtttgcctctcttctttataatgtgaactctttgaaggcaagatcatactcttctgcaatactgcatcttcagcacaggcatctcctctgtacacaataaacaccaacaaatacttgctgaatgcttatataaatgaatgaaatcaataaatacatgaaatgaaaaagtaaatggatgaaaaactgaatgaatgtttatgtttctgactctctgtaatgcaaactccttgaaaactgggtctgatttttttcatctttgtatctctgttcctaatacagtctcctgccctaatagatgctgggcaaatatttgccaaatgaatggatgtattttaattatcatagttaaaggagataatgtaacttatacccagtacatacataggtattgaataagagtggcaattattaatgacttacaatgcctaatacataggaaaatcaatttatatattaaaaatggaccagatccgtacttcccttacttgctcccctcttcctttctttctccagcaggctgtataagaagctctctagcggggaggtggcagccaaaacagcccaggaccctagtgtctgctcatctctgggtgggggccttgactcctggcccttgagcacctttctccttgcatggctgctgagactaattcactttgaggtcattaagatggaggctgagatgatctgaacagctcagagggctgaattctgattccctgctgctctccaggaggatcaaatgagattacagctcttttaacattctggcattgttttgcccttgtgcaagtgtgtgctcacaagcaattgctggaagccctgtgttaaatgcggtgggaaggatgggaattggcatttgatttgccacaaaaggaagatactctatgtggccccacttacagtgtgtggcttcactccctagtaggcagcagtaggactgttcagctagcatttcagctggcaaaaggaaggccatactcaggggtcaagtctcagcttgtcctccctctacactgtgtctactggaacgacttgatctcttcaggacttcggtttcctcatctatgaaatggggcctgtcctgtctgtgttattttcctatccaaatctatgtgttgataattccaatctgggtgactcctagaaaaagattccacattcaaggaagctctatgaccaaaggtgattaataaagagtactgagcccagcatggtggctctcgcctgtaaccctagcaccttgggaggccgagcagagcggatcgcttgaggccaggaattagaaaccagcctggccaacatggcgaaaccctgtctctactaaaagtacaaaaattagccaggtgtggttgctcacatgtgtagtctcagttacctgggaggctgaagtgggaggatcacctgagcctgggaggttgaagttgaggtttcagtgagccaagatcgcaacactgcactccagcctgggtgacagagtgagactctgtttcaaaaaaaaaaagaaaaaagaaaaaagaaaataaagagtactatacacatttccctactttgaaatcagactgagttttttaattcaattactgagctccctgatatattaggcttttaaatttgtttaaaaattattttttcagggtcctcactgttctattaatgttaagacattctggttcttgacagcgctaaatttttctcgttcccaaattgccactcaggctaagcaagtgccatataatgtcttacagcttggggtaagttttattacaagggcattttctggaagcatcaggatatttggaaattatttttccttcttccccacgggcctccctaaacagttctccatgaatgtgaattttagtacagttcaagttccaatgacagtataaaaaatctctgttttatgtaaacttcacagatctcaccaggctgggacaagaattttcaaaagaaaaggcaaactcactgctttggctaattctgaggcaatgttctctccctgttggcctccagactggcctagtttaaggaacaaattagagaataagaattttcaaacttagggaacattgccttacataggacaattttaaatgttagaacttcatctccatagaagcaactaagaattttaagactccatcatgtgccaggtattaagtattttttttacatattatcttattcattaaaataatacttccagaaaagagggtaggtccataaatttaaggaacttgcccatgttcatgcagctggcctgagacaaagctgaaatccaaatccaaattctctgcctccaaaccagcacttcccttcttcccagtactgactgcttggtttttctgattattttgattattattattattattattattgttgttatcattttggagacagggtcttgctctgtcacccaggctgaagtgcagtggcacaatcttgacttactgcaacctccacctcctgggctcaagcaatcctcacacctcagcctcccaggtagctgggactagaagcgcatgccaccacgcacggctaatttttatatttttggtagagatgggatttcaccatgtttcccaggctggcctcaaactcctgagctcaagcaatccacccactttggctttccaaagtgctgggattacaggcgtgagccactgcacccggcccgattattttcatttgaaggatgccttaactatataagtcttgctatgttattatctaattcctttagtgttttaatagctttaatttattttcaaatacttcttcccagtcggtggcttatcttttttatgattttaactgcatctttcaaaaagttcttatttttatgaactccaatttatcgtttaccttttttggtggattgtgcttttggtgttgtagctaagaaatctctgtctaactcaagattacaaatattttctcctatattttctataagttttataattctagtatttacattttagatatatgatccactttaagttctgtgtatcttatgaggtgtgaaatgaagttcctttttatcaaacagatgtctaattattccaacaccatttgttaaaggccatcctatctccactgaatggcccttgcaccatatatgtggggctctgttagtgggcactctatcctgttccaatgatctgactgtacgctaatgccacactctcgtgattactgtagctttataatgaatcttaaagtcaggtagtgtaaatcctttaacttttttttcctttttcaaagttatcttggctattctagaccctttatcatttctttagcttttatttattcagggatacaattacaaaacaggatttagaaatctaaaaataatttaaaattaaaaattactatataaagagctgtatgaaaactacctataatgtagcttcatcaggaagtgaggccctctgggcactggattccatttagttaccataaaatttagttgcagataccttgcatggattgccatttttttcagaaaaattaaagtgtaataatttataccagaattgtattggacatgattgcaattttcactgatgtttcagaaaataccttgggccctagagtatcttagtcattataaacatcagttgtcattgtcctagtattgtggggaattactgattaaaaggagttaattagttgtattgctatctaccatagttatttactctacttttgatttgaggaatatctttcttcaaacatctgaagtgttgtatttgatagtggtatgcaaagcattctggtgtctgtctcttccaataaagcatatccctatttactttaagcttgctatctgctggagacagtgaggagtgactattaattaggcgaattgagctctgatctgttagctatcaatgccactgtgtgatgtggagcaaattacttaccctctttgggtttcatcatttgtcaaatgaaaggtttgggctagttaaccctgagtggcccatttggctgtagatttttcttactcttttgtagtgtctttatccacttaaaaattataacccctttcaaaataatcaaacgaaaacttctaatgtcaaaaagccctgtgatgagtcagagagggagctttctcagtcaggaagtagtagttgtttggtgcatcacagattgcctaacaccacggcatgactctagttttaaccatggccagcactgagcaattaagatggcatttatggctcctggtgctgagatattttgtggcccatggaactcccatattctaagaaggaaaagaattacttctaatcccaggcaatcccaaggcttcagagttctcctgagttggcaggttagattttcaaatgtttctccaaagtaaatggtactattacttgaaaccaagaggacttcaaatatcttcattgtcgttccgatgccaaagcacagcacagctacaatgatcattgctgtactaatagaataagaagcttagagagtgggtttactaggaaatgcagaatagagacacaaattaaaaataatataagagaacatttattgggcacctactgtgtgccaggtgctgtgccaagcactttatttttgagacggagtctctctgtgtagcccaggctggagtgcaatggcatgatctcagctcactgcctgctctgcctcctgggttcatgccattctcctgcctcagcctccggagtagctgggactacaggtgcctgccaccacgctcggctagttttttgtatttttagtagagacggggtttcaccatgttagccaggatggtctcgatctcctgacctcgtgatccgcccgcctcggcctcccaaagtgctgggattacaggcgtgagccaccgtgcccgaccgccaagcacttcttatgcattatattagttaatcctcacaacattcttgaaaattaggcattatcatctccttcttacaaatgaggacaggatgcacagagcgtttatgctacttgcccaaggttacacagtggtaagtggcggagctggtcttcaatccgtatctgtttcaatctagagtttaaactcttaatgatgacatcagagacgagctagcacatttagagagtaattgcatgtgtaggattacagtgatctaaacaaagaataacaggttctgatgggtcactttggggtagacttgatggaagaaagaattcacagaagatttcttgaagaaattgttttgagttttattttgaaacggatataaattggcctagagagacagatgagttggcactgaggagatggactatatgaggctgtgaagatacaaatgaacaaattttgtgttcaggaagcaacataaagacttacgcattgcagggtgatagccagaaataaagctgatgtcatagggatgaaaatccaagaggtttctctttattataatgggcactggagatgtactctcagtctcaagcaagaaagggaacataattaaaattgtctttgattgtacagtttatcctacaactcatgtgggataaatatgagctttcagtgcatcagggaaggtcaaaagaaaatttcttagcaaaacatatttgatactcaacaaattatcttcaggagtaccacatagctcacctcactaaggccctatggacaaaatagtgcaatgactgtgtatttaggcctttaagaggcctgaatacagattttacatatttttttagaaagaaaggtgactagcccactgcaattaagccaccagcacattcctttggcccatcaacactggtattgtgtagtgtacataaaaggaacatagaagggttatagattaaagtcagggttgggcaaatagaaatctctcagcaatatgtactaaattgaattgaattgaagtctgctttcagatagcaattgctgctcttgagtgagggctaatgtattcggtgaattatagttgggtcccttccattataaatccactaatgctaacttacttaatgtctcttcacattttctaaaatgacttttctctctctctctccctccatctcccgctctgtctctatctgtctttctctctccagttccagagacctaatgacttctcaccccctttccgctttgggaccgtgcccaacggcagcacagagagaaatattcgcaataactatgcagaaatgcatgcctacatgggaaagttcaaccagaggggtgtagatgatgcattgctctccctgaaaacagggtaagaactgcttccaagctcagagtccttgatctgtttctcacatttattaagcatactattgaatcacatgcactaggtataccatgcttggtatcataaaatgttaaagaagacttcatttgctctttatggatttccaagttaaatttgatcgtatcatttagaccagtgtacaacgattcctatgctattacttctatgtattttttttacaaattattttctagttgcactaatgtaaccatgaaataagagtgaaataaatgtagaagtaggagggcagagtgaaggataaggtatttgtgccgtgtatgtaaagacctgttgtccaagaggtgaaaattatggttctggtgtcttatggacaagggagaaataaaagggggaaagtgtaaatgtttttagataattaacagtaagaatgcgttgactgatctccagtgccagcttgtgttaacatactctgtcctctagggagtgtttgtccattcataggagttcatgacctacacatgtgttggcttgcacagtcccagccacactggtccctttgttcatttggcctccacaagccacagctatggaagataatggataacagagcattatagatgttgggatttggaggtcaaggggtctcgtagctgattttctttgttgtatgatgactaacagcacttggaccttgtctcaatacccttgtagctccaggtctggaaaaggcacctagataaatggttacttaaaatactgttagattctattttatcaccataaatacagtcacagaagatttcagaagatggaatttgagcttgaaggtagggccactttgggtagtctgaccactgctacacccactgttctcattcatatcagggatttggttttttggtgttcccctttctatcgggtacctaacaaggtgacttaactaataaaaatgaagggaataatggtgttgcttttctttcttgcagacctctctattgcctgtaaggctatatctaaatttcttcctctacctttgatatgtttaaatgttggttttaaatattgattcatgccttcctgcccctacgcctggtcttattcccttttttatgtatttctgccttgcaaagcacaatacataaaatgaagttcttatatgtttaggaactatatgctgtaatttatgtatttgagagatctgaattcttctgtattttgctttctcttgtagtttcactcatctgctcttacacaagcctgtactgccaccacctcaacccctcacctctatccttgtgttgcacaacagaatactggaaccttcctgaccacaaaaatagcattgcacatctattgaaacacaaacacctacacttatccccactccagactgtaataaactgagaaatgaaaaatgttatataaatctaaccccatgctatttgttgctcgttgcagtggttacttttcattatttctgttattatttttattgatccctttttactccttcttcctttcagacacagtttatgagttggcttcaggcccaacttacattctcatcattcccagtgggaagaaaagaactcctcctttcaacccaaaagcacataaagaacagcctgggatttaggctttagattctggcagagttccaacttaaaccttactttgaaccaattctccacatagttttctggaaccctactgcttcatattaatggccccacaggtagttttgttctaaaattcctccattggatttgtttgcttttttcctgtacaggaaactggatgccttcatctatgatgcagcagtgctgaactatatggcaggcagagatgaaggctgcaagctggtgaccattggcagtgggaaggtctttgcttccactggctatggcattgccatccaaaaagattctgggtggaagcgccaggtggaccttgctatcctgcagctctttggagatggtgagttcaagaaagggaaagtgcccatttgtcctctactgatggccagtccaaaacatcaacctttccttttcttccatttctttaacctgtgcatttccggaaaagcatttcacagtatattgtgtagttttcgggtatatatttgtttcctattgctgccataacaaagtgccatgcactgagtgccttaaacaacagaaatgtcttgtctcacatttccagagactagacgtctgaaatcacagtgccagcagggtcaatctcttccggggtctgcaagggagaatctgtttcatgcctctcctatagtatctggtggtttgctgataattttggcattccttatcttgtagaagcatacccctgacctctgattcatgttcacatggtgttttaccagtgtgcatgttttccctctgcacatgtctgtgtctgaatttccctttttcttaagaatgccagtcatattagattaggggttcaccatactctgggatgatctcagcttaattatgtttgcaatgactctatttccaaataaagtcacatcccaaggtattgggggttaggacttcaacatatatattttagggggattctataacatctttcaacccataacaagctgaaagatggcagggagaggattgaagcagtttgtcaaggaggtctttttctgggttgcaggctataatcaaaccttcagggataaagtaggagaactgatattagatgtttcatccagtcatctcacatgtggccaaaataatagatggaactgtggaaggtctctgctctttatgtgcccagaggtagggcggagaaataaacttgcggccatctcttcattcttcctgctctcccatcttgctctttcagctggaagaggcagaaggcagggttagggtcctcagaggcagacaccatcagccactccccagtatcatcctggcagcagactgaaccaccaacttgagttgaaaaaaatctcatcttctgtttcattatattcctgtcttctgcatccctcttcactttattgtacaaagaaactactgtttctgttagcattacagaaactaactcagttgtggatgagcagccagacccttgttggcttcaccagccatcagccaagtggctatctcaattatgtctgcagctttgctgttaaggatgagatcagaagcagaagaccacaggtggatttttagaatccaggtgaagttgtctgctccactagttaggagaatcatagtttgatcaaaaaaataagggaaaagtgatttgattaacattggaaacaggaggatgttttagctggagtgttaccaagccattttggtataagagcttctgtaattttagtgtagctgtcactcaaaggcaataatggagactgtatccatgagaaagagatgatttgcaaaagttgccaaaactttagtcagattatgcaagcaaagttcaattttttagccaaagtagaactatgggaataggcaattttctccatgagatttttcagaattttgcttgtctagaattagatgcattctagggcacatggtttcttttactttccttttgtctgggacctcttcctacttcctcctacttcctagcatctggtgaagtggaaaaaggtcattgaaatctgacatgagttaaagtgatcaaagcaccgttaaacaatgtgtaaagaaggcaagtctgaatttgggggtcttattttatccaagcttactcctctttgctctttattttcttcaacaagagatcagtaaatctgaggggccctagggaatcaatcaatctctctgcccatctctctctgcttgtcttctccctacccaatctgctttgcacaattttaagggcaattttctgaatcactcgtttgattatgttattccccactgtctataatataaagtacagaatgcttaatctgatactcagatcttcagcactcttacatcactcttttttattcagcttcttttgcctactatacctttttctgtttgaactgttctgcatgcctttacttaaacaagccttgtgtgttcccaccgaccatactattcctgctgcctggagtgcctttttgtacaatgtaaattaaaattcatccatccagcatgcccacttccaactcctacttacttcacgaaaacccactggccatgccatccacagaattactgtcaccaatttggactcttgttacctgcagacagcttgtcattgtgattatttatatgccaatttatacaggctagataatggagagcgggagcaacgtctcatgtgttcatatcgcctgcggtactcatgtgaaatttttattgaatgcttactaagtacgttgatgaattaatatgtaatggcattaataagattactgttaactttattcatttcctttctttttgtctccttgtctctttttctgtcacgtatctttctctttcttgctcaatactcctctttctcccttttctctgctcctttcctgtctcctctttttatccattttccttctctgtcctttccccaggggagatggaagaactggaagctctctggctcactggcatttgtcacaatgagaagaatgaggtcatgagcagccagctggacattgacaacatggcaggggtcttctacatgttgggggcggccatggctctcagcctcatcaccttcatctgcgaacaccttttctattggcagttccgacattgctttatgggtgtctgttctggcaagcctggcatggtcttctccatcagcagagtaagtgttttgatttaaatgcctaaagcttgttagggacagcttagcctagcactgtgcaaagcagagagaaccaagaggacactatctccacccccatgttgctcaagcaagaaaccacatcatgtatgttttcttaggagtttgtgtgatatgattgcaagtggctcagaaaagtgggtgatactatatttccttcaagaaacagctttctgtgtgggatttgggcagttggttctctgtaagaactgacagatctgtcaaaatggaaaatttggctttttaccaaatgtctttcatcaccattagttggttctgtataaattgtattaactgtctaatcctttaaaaatgtacatttctatttaaataatcatatgtaacatatctctcttattttaacatacaaaggtatattattagttgtttcactctatgttttaaccatgtgttggttatggagagttgaagagcttaacagaacctttagaaataagctctgactcataagaaatttacattccagaaacttccctagttggagcaagagtaaaactcttaggtcattctttatttaggtctcctcttcattcctagtctaaaatgagacactaggaagacagttttatgtatgaacaggtcacagggagaagtttttttaaaaagtgagcttcttttggttttgttaataaagtggagagactaagtcatgagaggtgaactcaaatgtccttttagaatgaaggtctaggttccagatatggccaaccaactttgactcaaatggagttttgtattaatgagaaaattgatttctcgttaaattatttcatcttttcatcattttcctatagtattttactgatagagaacaatttctccgtgtcctttctggctgtgagttaattcaggccatcaggtgagctcagaacaggaggctggaacttggggtggtgatgatccctgagccatgttgcttccttggtagcccttccctaagatctcagataggggaacaccagaagccatgggagctggtgatgtgtaataaaaaccccatttataatcctttgacatgatcaatgcctctatagaggaaaaaaggcttggaattttctcttgagcttaatcaggaagggttagaagaactgggaaagtggaataaccttaccttgaagatcttccatcttgctgatgccctgtgagacaatgagacttaccttgtctaaacctttcttctttcccatttcgctacgattcttctaaccctctcccctctcattcccatccacggagacaacttccctttccaaattagtcccgttcattataatgacacaattcaaacaacctcttttcatatgctttccctagccagggagaaaagttccaagtttgtccacctttccaggcagggaacaagatgtgagaaggaggttggcttgactttagaatcaaacatactgagccctccaggaacccagcccgttgcctctcctgcacggtgtccttcaaagccctgtacaaagagctgtacacagggagctctcgatcaatactaatttgttaagatgttaattattgatgataatattaagtgagtgagaaagtataagaaggaaaacaggagctaaagagagaataaatgagagaattcaacaagggagttatttattcctatttagtactggctgtttttcccaattcttccctcccacagtgtagaacacagcaggagaaaaatccttctttgaccccagggcttgctaattctctctttctgtgaattttgttcatgcttggctcaagaagagaattgctcagctgttatttggtgaccaaaattctaaacctgcttaaaatttgtcagagctagaaaagagtgacagttgtaagctactgagctcccctgtgctttactgtcagccaggtgtggcccagccacagcagagcaacctcagtgtccatagaacatggccgtttatttccaggaggctgatgatattttttgctatgggttgatatcatggcctcatttttaagatgtgaaaatctaggcatagaaaaccacggtaagtcaacagtgaagctgaggcaaaaatgccatatcttatgattccagtccctttgctcaagttactgggtggggccatgcccccccctctgatggccaggtcactgacctcagctcaccacatgacagtcaccaaatttaggggtataaattaggcaaacttctagccacatctaatagtatattagactattcgcttcatgctttccctttttcttatccagttggagcaattattggtgggagagtgttttttgtggtcatttctagcctctctggagatctaacctgtccctccattcttgcttcagggtatctacagctgcatccatggggtggcgatcgaggagcgccagtctgtaatgaactcccccaccgcaaccatgaacaacacacactccaacatcctgcgcctgctgcgcacggccaagaacatggctaacctgtctggtgtgaatggctcaccgcagagcgccctggacttcatccgacgggagtcatccgtctatgacatctcagagcaccgccgcagcttcacgcattctgactgcaaatcctacaacaacccgccctgtgaggagaacctcttcagtgactacatcagtgaggtagagagaacgttcgggaacctgcagctgaaggacagcaacgtgtaccaagatcactaccaccatcaccaccggccccatagtattggcagtgccagctccatcgatgggctctacgactgtgacaacccacccttcaccacccagtccaggtccatcagcaagaagcccctggacatcggcctcccctcctccaagcacagccagctcagtgacctgtacggcaaattctccttcaagagcgaccgctacagtggccacgacgacttgatccgctccgatgtctctgacatctcaacccacaccgtcacctatgggaacatcgagggcaatgccgccaagaggcgtaagcagcaatataaggacagcctgaagaagcggcctgcctcggccaagtcccgcagggagtttgacgagatcgagctggcctaccgtcgccgaccgccccgctcccctgaccacaagcgctacttcagggacaaggaagggctacgggacttctacctggaccagttccgaacaaaggagaactcaccccactgggagcacgtagacctgaccgacatctacaaggagcggagtgatgactttaagcgcgactccgtcagcggaggagggccctgtaccaacaggtctcacatcaagcacgggacgggcgacaaacacggcgtggtcagcggggtacctgcaccttgggagaagaacctgaccaacgtggagtgggaggaccggtccgggggcaacttctgccgcagctgtccctccaagctgcacaactactccacgacggtgacgggtcagaactcgggcaggcaggcgtgcatccggtgtgaggcttgcaagaaagcaggcaacctgtatgacatcagtgaggacaactccctgcaggaactggaccagccggctgccccagtggcggtgacgtcaaacgcctccaccactaagtaccctcagagcccgactaattccaaggcccagaagaagaaccggaacaaactgcgccggcagcactcctacgacaccttcgtggacctgcagaaggaagaagccgccctggccccgcgcagcgtaagcctgaaagacaagggccgattcatggatgggagcccctacgcccacatgtttgagatgtcagctggcgagagcacctttgccaacaacaagtcctcagtgcccactgccggacatcaccaccacaacaaccccggcggcgggtacatgctcagcaagtcgctctaccctgaccgggtcacgcaaaaccctttcatccccacttttggggacgaccagtgcttgctccatggcagcaaatcctacttcttcaggcagcccacggtggcgggggcgtcgaaagccaggccggacttccgggcccttgtcaccaacaagccggtggtctcggcccttcatggggccgtgccagcccgtttccagaaggacatctgtatagggaaccagtccaacccctgtgtgcctaacaacaaaaaccccagggctttcaatggctccagcaatgggcatgtttatgagaaactttctagtattgagtctgatgtctgagtgagggaacagagaggttaaggtgggtacgggagggtaaggctgtgggtcgcgtgatgcgcatgtcacggagggtgacgggggtgaacttggttcccatttgctcctttcttgttttaatttatttatgggatcctggagttctggttcctactgggggcaaccctggtgaccagcaccatctctcctccttttcacagttctctccttcttccccccgctgtcagccattcctgttcccatgagatgatgccatgggccctctcagcaggggagggtagagcggagaaaggaagggctgcatgcgggcttcctcctggtgtggaagagctccttgatatcctctttgagtgaagctgggagaaccaaaaagaggctatgtgagcacaaaggtagcttttcccaaactgatcttttcatttaggtgaggaagcaaaagcatctatgtgagaccatttagcacactgcttgtgaaaggaaagaggctctggctaaattcatgctgcttagatgacatctgtctaggaatcatgtgccaagcagaggttgggaggccatttgtgtttatatataagccaaaaaatgcttgcttcaaccccatgagactcgatagtggtggtgaacagaacaaaaggtcattggtggcagagtggattcttgaacaaactggaaagtacgttatgatagtgtcccacggtgccttggggacaagagcaggtggattgtgcgtgcatgtgtgttcatgcacacttgcacccatgtgtagtcaggtgcctcaagagaaggcaaccttgactctttctattgtttctttcaatatccccaagcagtgtgattgtttggcttatatacagacagagatggccatgtattacctgaattttggctgtgtctcccttcatccttctggaataaggagaatgaaaattcttgataaagaagattctgtggtctaaacaaaaaaaggcggtgagcaatcctgcaagaacaaggtacataaacaagtcctcagtggttggcaattgtttcaaccagtttgaaccaagaactttccaggaaggctaaagggaaaccgaattttcacagccatgattcttttgcccacacttgggagcaaaagattctacaaagctcttttgagcatttagactctcgactggccaaggtttggggaagaacgaagccacctttgaagaagtaaggagtcgtgtatggtagggtaagtgagagagggggatgtttccaatgctttgatcccttcttacttaacctgaagctagacgagcaggcttcttccccccaaaactgattacaactgctacagagcagacagttaagagaaatgagcttgacctttaagagaaatgagctgcactccatgagtgcagctctggaggtacgaaaagaggggaagagacttggaaatgggagacgggggcagagagggaccctccaccacctctttgggcctggctccctgggaatgtgacttgagcccagagtgaacactcttggtagaagcccttctaccttcctgcaacaccttgtttccctctcagattgtaccattgaggaataaaaaaagatatacatgtataaaactccagggatgagggtaccagcagaactgatgctcccttcacttaacattggaaaattgagaagggaaatgaatatgtatcactgccggtcctgaaacttgcggtagggctatttattctatgggtcagttccactgtcctgccatcctcccctacacagggtggcatccagagagccccaggtctgtgtggaagcttgactgcaggatcgccatgttgcacacaggacacataaaccagaaaggtgctcatcctcctctggaaggaagctgccatgtctcttcaagtcactccctccagggctgctcttcgcccctgtttgccctcactcgtgacccttcctcatcccgcccttgactgctgtccccaaccctcctccttgatttttacctcagtatctttcattttaaagccaactgaaggccttgtaaagctttgttttctttctaaaatgaacatgggggcaaggggctgaacctctcacagatttggtgagaggagcacggagtgctttaccttagataacagaaaagactgagagaggacagagggcatgaggcacctccaggaggaagaaggcgaagggccacgtaaacactgcttcgccctgactctgtccaggggtcagggactcatcccctcatcttcctcttacctcacccctttcaaacaaaaaaaccaaaccaactaacctagcgaacagcaatctagaaccaagggagctctttcagtctccgctggcaacagaaatcaagatggtgtttatttcatatgtaaatattttgttttctaattttgtatagataaagtgttctcttgtgagtattcagggtgttgggctggagggagtggggtggtgatgggaatgagagggaaaaagtgttttgttatgggttttcatttcccattgggggaattgttttgtatggcttttttgcttcagggtgtctggaaaaagcgaatgctcatggaggccactatggtgaaaaagccaggggaaagtaattgtgtccatcccccccagaaaaccagtcttcttactggtttgtgagaaatgttcatgcactttggccagggttttacatagggttcaatttggctctaagcaaaccccaggtctgactcctatcttctaggtagaccctaggttaccacattccacacaaagacaggctggtggcaccatatttcctctgtcagtacctagggtaggaaagattcccaaaagggcttaaacagaattaaggtcaaattaacttcccattcttggcgtgactgaaaggtttcaggaagctcaatcctgagaaatctcccagcggcctcctctgatgctgaaacaatcgtctcagtcatctgagtcttttcttctttaggacctgggcgctgactcactccctgccccatctccaccctcagaagtcagcctggcaaacacacgtggaaaaatctccactaactctactttttgaagcatgtgatatctggtcacagagaggtagtgctggatatgtgtcttacaaatttgcatgcttttctagaaaagatgatgggatccactagaaactcagtggtgagatgattcccttagcaagattgctgaagttaggtttagacgtgggagggtgggtatgtgagcaatggtgccaatagcggctctttatttgccttgtcctcattactgccatcaggaaggtgctactggcctcgagccaggtgttcataatctggccttgggttaaccagacaaatagaacttcttttcctagactgttggctttgtggaggttggcagcctctatcacaggataaaatttccaaatccatttacccagtatattcactacattttttcctatcctcccatcataaaagctgttagctggacaattttatttttctaaacttatttggccccagttggttgcttttcttcaactggatatttgcactgggactaagttactcatggtctgcttaagaaaacttaaagaaaggaaggctgggcattgttaaaatctagatgttacttaattccagaataacaagcaagtaaaatgcatgaggaagaattcagctataagcccaatctatatcacagatgggtatgaaacaacacccaatccatccaaaactgtgagattccgcagataccctcaggagcacctaatattcccatgttcttcagaatccatgctttctcgctttgtaccctctatcattcccttccattgcagaagtggttggtgagtgtggtcctgtatgaactcctttcagtggcaatgcttaaatctcagcatttccactgacaataatctgacccttgaatttgcctgagtcgagactttgcacacccttcaaagtgatgcatgtacagtggactttgttatttcaaaatctgtcactgtgtatcctcagccagaacttgggaaacatccttcatatgtatttccctgcactggccacagccatgttgtgattgaggggaaaatcccaaatgattccattaaatgttgctggtgtcagtagtgccaaaaacgcatgtatgacatgatacagtaggagttgtctatacagttaagtgactatcactcacccggtcttccgtggccatcaggagttgcccaagggagaattctctgcagagtgctggtcacctgcacatgtcactaagaactaggtttctttggttcattttttttttttttttggtcggtttttagttagttagttcaagatttacagatagaataaccagattgtttgggcaataagcttttggaaaaactattccagaactcactttattctttcaatcatcatctctctaaaaaggccctgtcattgcttgacaccctgtgaatgtctgtttttgtatgttaggaatgattcagatgtgtgcataaatgatgtcactgcagtgatattgatgaatgcattcagcatttccagggactgtggccataccttatgtgctctctgagcccaaagccatataggaaatacatgctcagtaggctgctacacactacagcagagcttttgctttcttcacttgggtgtcagagacttttcctcctgtttaaggagctcttcatggaggagaagcagctgaaagtgaatagtcacactgggatgggtctggccttatgtatgctatgtggtccatggtgtgttgaaggtcctgaaaaggtctttttcatttcccaccccactgcaactaccaccttcccacacagatttgttgctttagcactgagctgagctgtctgtcattcgaatgaaagtaatcccaggaaaggtgacatattaagccatattagggatgtatacatttaatcacctaatttacattaggaatctcactccttttcctgggaataagttatgatacaagagaagaggaagggagcagagagcactgagagcaatagagtagggaacaaggatacaggttctagatggcaaagacatttaaaccatattttggcctccgcctgcttttatttaagcctcatttgacacctaaataggactcctggttaggaattattttcaatacacaatcatatgagtgtataatttatgaatttctaaattcagtatcttgtagggcaggttgagaactatgattctttccatagaaaatagaagagtgatgcttctcctccattacatgttactgagtaggcagctagaaaaatcaaattgaattagtgatacaataaaatttactgtcattgtctggtttctgtcccagtttaattaatcttccaattagctgagttggtctatatcctatactttccacctccatagggggtgccctgttatctggtaaaagagccacttatgacctcaggtgctacttaacctggggggcaattgtttcttaggcctagcagatgtttgggatgacactaaaatggcagattagtcagtctgagaatgtctaatattgatctgaatctaggattctattctagtttggggggtggggttgcagtattgtataaaatcataggatatctgagaacatcccaccctcaactcattccaaccacattgattcagtcacacagtggccctgtgagctctatgacttagaagagatagcctatctattcctatgacaaaggccctcacccaaaaccttaaattgaaagccagtgctgctactttcatgccttggagagaactgtgacgtttagggcttctcatttacaatattgaagcaagaaaaaagaattttgttcagagtaatgggttagaatagcagtactgggaataagtagggaaagttagaaatcttccacatttctctctacatctctcaagagctctgtacagtgagtttctggagctgcttcatgctttgaatataattgctggggtgattatgtggttaagggctcctgaaagaactgaaggtgaaaagcagagtagatgagtagaattcctcagagccttggcactctggtgtgtagaatctgtgttttggagaaggtgaaagaactcagtgcaagaattaaggtacaattaaaaagcacaacactaagcccaatttaaactgttattttaaagattaggtttccacactttaaacctgaactcttttatcggtaattattttaatgttgtgatttaggaggtggagcagattctagtactatgcaggagaaaaaaataaaagctctctggttaaatatgtgagtttaattaaaccaacgtctattgtgcacgtactatgtccctaggctagttctgtgaatgatataaaaggtttcaaaatggagtatattgtactcacgtagaatatatgaaagcataagtataaaatatgtaaatgtatgtataaataggtatgcatacatttgtatgattatacatgcaagtttaatattttctggtttcagggtaggagtcaaagatatccattatgctatttgaaaaaacattgcagagattcagcttcccatgtcatggccaggcctggacttattcttttgaaattattacacctcccagagctaaaactctgggatttcctctctaaccacaaccttgccttttctatatcttccttccttcaagacccctctgttgttctggtccataaatccatcaggcctcattgaattccctctttggtctaaccctgtatttacccacattagcaatattctcaccggcaattcctttttcctcttgccatctcactacaccaaccatgcttagctaactgcatcccatccccttgtcattcattgcatccccaagaagagcaagtcttaaacctacgtgaagagcacaaattcaatcaatttaacctcacctgaagcctactcacttggactttttaatttctccaatgttgactcagtgtcacattctgtgcttgataaatttgttttattttcctttcatgttcatgtcctgtctttcaacaggcaatctttcctactgtgtttgcaagaaaatctgattattgaatcctcacatatgctgtcctctctgcctttagatttctcttgtctttcacacatcttttccatcctttctcccaaccaagtgctcctcttccctatgctctgacctcttctgaggtgctctccagccaattgtatttctctcttttgcatctttaattccttccacacatctacctgcaactatctcaaaaacacccgtcctacaactatctctaaagacaaatctctcaatccaatttgactcttgaatttctgtcctatcgctatcttttcacttcccaacttctcaaaagggtagtctttctttctccacttcctcaccttatgctcatggcttcatcaatgggctacaccctaccactcttctgaaactactctcaggcaacgttccaatgaagttcttgttacaaaagtcaatagccttttttctttacttaccctgctcttcaacctcattgacaattaccattgggaggcaatacattctggttttaatcttagttctctggtcctctaacctcattggttcctgctcttcctcttatctccttagcattgacttgccatggtatatctgagcttgaccctcttctccttatcttaatgcttctgtagcaatctttctgtcttctatgatttcaataactctttgaatgaagatgaatcccaaatcttcacttttagcccctaccttttgcttttccttcatacacatacttccagtcaccttctgaacactcaacttcatcttgactcaaatatccaaaaccattgctgcaaaccaacataatcaccaacttcctccttttgcttaatggtatcaccatgtcttccgtcaccgaactcaagcttttcaggcacttttgcctcctccattttcttcatcctgcatatctaaaaatttgaaaagcctactaattcttccccctaaggtttccagtctttccttttcattcagacccttccttctagtctggattatttcagcgtcttttagcattgttccaatattttatatttgaatctactcttgtcagtactcacttcctacatataaatcagatgtcattcttcagatcaagaaacaaccttcagtgggcttcacttgccgtagtctgccagcaataatttcttgttacttgactatgtgtgtgtcccataatccagacaagctgaataacatttgtttcacctttccctaccagcttgttttcccacttgcgtcttcccttaaactgttccctttgtccaaaatactctccttcctatctcccatctcactcccttcttgaataatatccattccctctatataagtcttcaaagaccagaacaacttctttatcttccattcagaaaataattttaggcattttatgaatgcccataacactttcgttgtttctccctagtggcagctatcatgggccatcttatttcataggtatttggttatacatctcatctctcctgctacagcataagctccctgtgttcagggccatgtatttttaaatctttttatctcctgtagcactaaacagagtgccttgtatatgaaaggcattagtaaatatttgatattattataaattataattgagaaggagtcactttattttgcccatttgtatctgcagtagcacctaaggatgaatccccccagtttctctatatatatctgcacacacaatcacatgtatatactacatgtatacagttcattatttcaaatggaatctggatttttctaagtgctttgtcctttttctaagtgctttgtcctttgaagttgttttggactgttttatggttaggaaagtgtacttggaacactacatgtgttcaagtaagtgacagagggagaaactatgaaggatattgatcaaattttaggtatcagcttttcagatgctttgggtagagcttgtatccagacactttactaccaagattgagtctctaataacctgatccatgctgggactgatctgtgatccaatatttagcttcttttttaacactttcagcaccaaaagaaccttgtcacagttctggctcactaatcacacagccttgtagaccccaggtggtggtccaacaggaccactgtatttcaccacacgctacttccacatttgtggccttgggggaactgtctgtgctggtcaccaccttgtctttatatttctttcctgagttctttggcttctcaccctttctgaggctttgtctacaggatcacttctcccaaagggaggataagagttgaggtaattgagcactttacctcttatctgtatatttacaatgaaagtaagttaggatttgaatgagctggctcagagagaatgctagtctctaaactactcctttctctgtaaatataaagggattcattacctcagggggagacaacatcacttctgaccttatggccctcccttatcctctggtccctgtattcttgaagccctgttaacccttcctcctcctctcttggctctacttagcaatctatcaatcattctttctagccagtgtcagtctctgtccctctgaagaaactcttggagctcgtactgtcctttcacttcagctgctctggtaaccgataatgttttcgttccttctcccggccagccttctctgtaaatctcattatgccattggctatgaattattcccctttgggaggcatcttctgccactgtgtgctaatttaaagcatactatagagaactgaactcaaataagttacaggcagtgacaagtctctttttttaaaaaaaaagtgaagaaagtccactcttcattgagacaggagtgggtaggacaattattattggcaaggtagggcaaaacttgtgacaacttgggagatacctagtgaaaattaaaatataagtctagagagataattttgcttttcaaaagtcctatggggtctagatagccttgctcctgaaaatgagaatagttaatattttagagcaaaacccatttcattatactatgagacttttttttttagctgatgaaacaaattatctggtaaacagctggtgggagggtaggaagacagccatcctcatgaaggacgttcatgaatctcatttgggccaataaatggaccaaaattctaggcattttagccatgaactgttcatgtcaattattttgcctacaaatacccataaaaggaaagggaggatatgaggaaggaaaagaacaggaagtctacactggagcttccttttgtgtcaccaataaagccagaagctgacatgtgaggcacatggttcccccttggttactggcttcaatgatagcttcggaaagtagggaaacttgaaagagcaaggaccaaagcggagatgagtgaggaacctgaatgcaaccttatgtgtgaggtcctgatatccacaaggaacctggccccatgtcattcctgcccaggtccttcagattacagcacccaaggagcccttgatcatcaccctgggcagagggagtgacttatcacaccacccttacccacagaatttaggccaccaggctgtgactccatctgtcccccttgcagtaagagattcatagtctctgaaatctgacaggagaacagcatcaggggaaggggccacaggaatgcgaatttgttgagctgcctgctcctctaggataagtatattacctgtttccagaggggattgtttttttttcgaaatgaaacaaaacatgcctgcctaaaacttcagccctattcagaacagtcttgcagttaactgtcattgtcacattttaattgtaattgattttcttttgaaatccatggctattttaatgctccctttgaccatgacataagaaccctctgcaaaccagagacctggccattaggttgcctctggctgagttatactctcagtagtttatactttgctctcagatattcacctgaacagcacaactacacagaatttgatctctttgccatgagcattctgatgcctatgtacctccctaatgcacacacacaatcttaacaaatagatccaaatttcctatgtcaatcatgttatggtagatgaaagtgttcatttagaatgggataaagagacatatcataatttatgcagccagtgttttctctttgctctacctggcttgtggatcattgatccctcaaggtttgacagaaatattcaggcttcatgtgaaggcagcatgttctttgtgatgaaacaacctagttatcgtctccattttcccattttaccctatggaatccatgtggccttctaaggtcctgttgatggactggtactaagaggatggagaagcagaagccagtccccctgagaacagacagtcctgttgcttagatacatacatattcgcacatgtgcccacatctcttcttggaaacatcatgagcagaggtggagaggtctgttctcaatgggaggaataagggtaggagaattccttgagaatccctattctcaaggaatagggataaatgccttcacggattcaataatttatctgttctctctctcccagggtcaggagcaagaaaaatatcaaggtttcacataggcaggaagcaaggaggatagtgaagcatctaggtggaggtggaactcttactgagaaaaacatgaagtagtaaaatcaccctttctttgatataaatgcatttagaagtcaatgagggcacttacagctgtgtttcccttcactaacttttcatctcttgcattctttacttctctttctcaatttattcatcttgaggtatacttatcctgagttgactctgagcagcccatcctcaaaacacaaacaatgttaggatgagaagttgagtgagcacagagctcgaacacgtgcatggtacttaatgtttccaaactcgagcccaatcagtctagcacagtcaatcccactgcattttaatgactaggatggggcctgctgtacatagctggacatcttggattacagaaaagaggctttatgtgaaggcagcattttctttgtggtagagcaacatagttatcctgctaactgtcctatttgacctgatggaatccataaggtcctgttgatgggttggttctaagaggatggagaagcagaagtcattctactgagaacagacagtcctgttgcttagatacatacatattctttatgacagaattcctcctgagactcttgcacaccttcagtgatcagcgcattcactttggttatttcttggtaacaggcacgagaaatgggtcacatagaaatctgaagagtcatttctcgagcatttttagcttattcccatgtaaagaggcactgagctcctgcagttctagcctgcctctgctcccctccttggggaatggtggagtttctaggataaccagcaacccattaggctccaccacacttagcctatggtacattctgagtaaatcacagtagttggtatgtgaatacagaagaatttaccataaccacttctccaaataacctcctttgacttggaaataagatcatctttcagttttacagatgagaagtcaaagcacaaaattggataattagccaaaagtaagattatacagaaaattcttgacagaaccaaaacttggctgaaccaaaacttgtccaaatttctaactctcagtctagctcagcgagtaatgctgcctgaattgtctgcccccactgtaggttttcagcatctagcagtggagaaaagtcacgaaatctaggcagctgatttagccagatcttatctatgaaatttccctttgtagacacacacacactccacatacatctacagagacaagtcaaaaagagcaagaagaaagcaaaaatttgaaaatcagaaaggttagagaggtttccacggtgaagaaaacttggtcaaataaaaatgtttttgaattctatagggtaagatattgtgaataattttttattattaaaaattttttttaggtagcatgtaatccacataaataaaaaactcaagaataaactgggacagaggatttcttccagagtgctacatggcaaaagagccttcaggaacgtgtgcaggggtgtcatgatactccgaaggtgtcagtagttttggtcagcccacagtgagcagggcagcctcaagggagagccccttacatccttttctgggcacctctgtctaattaagttcaaacatacaagcctgattctaggattaaggcataagttagttctgaacagaaaaatataaggcagttcacatacacaatgaattcttgaagaaagaacctatagcccccagaccgataataaataattactgcctgccaaaatcctgaagaaagggaagcatgggggctccaaaattaatagtctcctgagaatacttatgagaccttgattttgtcacaaggttgcaatggtgaattatttattaagcacccgcagatcagagaatcttgcaacaaccttctcttacaacccacctgttcacttatgaatgatatcaagctcaggatataatccatctttccaaagattttagtatctttagtttgggctgcagaagaaattttggctcacagcattatgcttaaaccaaaaacagtgaaagagctctagtgtcctgcttaatgtagagtaactttttttttttatcagtccttcctagccctagagggaagataggagaggaggtaggaagatggaaaagtccttagatgaatgagtgaggagacttctataccatcaacttcagagtgtactgatccccggagcctggttcaggaggctagtttcagatgatcggaggaaatggaggaggtagcttttattcccatgcatgaagatggggggaggaggtgggcactagactaattttttaatctaaaaaaaatcaagcctattacaaatctcatttttcccttgtccttttgcctcccaataattcacataaaatcgtgttatcatagtaagctaagagagaggggcagtagctatttctaccttgactccgtggtgacttcatctttttcatgagtgtcattacagatacctggatcatgatgatcctgaaaaacaggtcacagggccaacagctgatgagtatttggagcatcttattcccccaagatgaccactccctgtcttctgctacacctatattcatcgggggggggaggtgggaaaatagcaggattcttggggactctgagggcatgaatggagaattatttgattgaaaccacagagctcttgtacttagtattaaatattaaaatagaaatgaaaagttcagcttttctgagctgtaccatagcggccaatggaggaagtcttacaaagaaaatctatatctgcacaagactgaagccactaaaccgagtatacacaacataaagatatcttcctatttcaagtatcccttagggggcatgggtgcttagctatcctatgaaagacagagaagataagctcaattttagagcccagagcttgctccggaacagcaagatccacatgaacttaaactctttcccactgagcctaggggtggaatgtaattcctctgatggttttgatttatttccaagctagacttctctatttgatcattggcaccttggcagctcacacatctccgtggtctcttctgtagctttcagaaaaaaaaaaaaaatatatatatatatatatatatacacacacatacatacatacatacatatacataaccctgtttgggtaaggcctattgacagaagccagatatctgggtggaagttagaagatgggcaaggaattcttatctcagagtttcaacactgcgacaatgtggagagaagtctcctgggaaaatgcagatgcccaataacttccaaaagaatcagggaagttggagtatttttgagatttacagtgtctttacttcagtaaaacaagccatagcaacattatgctctgcagagtcttctgttcacctttggatggaaaagagctgcttctcctagggagacaactaagaccaagaacaaaactcccatctcctaggccaattattgttttctcctttcctttcttttttattctctttgttacataatggtgaaatctacctggccattgccagtcaaacattctaattgctaaatatcatacagaaattcatgaaaaaagagtagaatcagcagatttcatttaatcccaagggtctttgcagttttcatcctctccctcaaagttatctcttctttgagacacatgatcacccctttcctcttctgggtggccatgattccaaaatgaacttcagtggttggtgcttcacaaaaggaaagacagctataatataaaatagaccaaaatacttatatttttagccactgcaaagtgggttttatcgttgagaacaaccttccaagctccttacttggaaacccttcctcacctcccagcctcctggcagctctcctggttccccttcatgtttttggctcccctccccgactttcctttcctatgaaaatgggatatatcccttaaactgtattcttatctaaactatcagactgttaaaagaaacccttgacagtaatttttcatggttttctcatcattttttaacttaggaagttggagaaagaatgacaagcaggcaaatgaggtcttgttcctgagtgcttcaactcaagatcaagtgctgggatagtgagtggctcttagtggagagggatgtgctctggaatattaagccacctctgagcatgtgtcctggtgctctggtcaagatgcctgttgtgtatgtggaggtattttgtggcttttcttgttctctctttttaaatttatttcaaggcacaagccctttgtgatggaggatgtctagcttgaacatgctggtaatgtgacactatcctcagctccccttggccctgggttcataggaggcaagtgtttctaaatttctcgcccagtgagttgttgcatgttatttttaaccattaatattgtgtgtctattggaatgagaaacagaaggttgaatgggaaatagattcagtgacaagcagacaaaaagcttggttctgagaaatgttcttcactgagttgaaaaaaaaataatctagaaacaaagaagagggaaattggggtagaatggtttggtggtgaagagacgatgacacccacatccagatgctctggtgtattccctcagagatttgtcattccctgtgagctctggcagaaggagaggctgtgctgccattgatggctcagaaatggtgacaggctggctttagaaagagacgtaggctttcttccagacagacattgataagcattgtagctcgattcttcaaaaccttgtctacaaacctttagggcagcccctctccaatgatttccattctccagtcaagaagattctgagtggaagagccttgtgtgcattgtgattacattgacttaaattgggaagccaaggggcactgagaactgaatatatcaggggaatggagttagctgaacctttttttttcaatattggaatgattttggatcacaaagttaggtcacctctgagagagaaaatctgttaaataaaattatatcttcccatctccagtgaaatcactaggttgttaatgtgattactgtttacttcagaaagaaaattgctagattcgattacaaataggcattttacagattgatttaatcctgagtcttacacatattaacatggaatttactgactcagacatgatcttctaagctataaaatattactggcgggtagtagatcatatgttctaagcaaaccaggaaagctaaaacgttaagtaatcctcccaaatattcagcgtctgtgtatttcactatagctgaaggggatttgggagttaggccgcaggggagaggagggacaaagtgccatagattaatgaaactcggagtaacttttttcttacctattaaaaataataattaacccaaggacaattctcaaaccagaaaaatcatgaaaagtgagctctgcacttgccattggttaaaatttagaaacacttagaataaatatccaggttttgggggaggagttgtttccttgcttgcattgttttgtttactggagctcttattttggggatatttggtctgtggcttcagagcatgttttggataaatgacttatccatgttgatatttattgagtggaaacccatgccaggctgttctaggtgctggaatataagaacgaaccacacaaagtccataccctcttgaagtttgtatgttgatgagaggaaatggacaaaaaagcaaatcaatagatctcatgtcagatagtgcaaagtgtcatgcagaaaaatgaggcagattaagggggatagatgataggatgggtgtggggttgctatttttgagtaagcaaagatgacatttaagtaaaggtttggaggaaatgagggagtgagacttggggctttctatgcaaaggcaaagagaaagcaattgcaaaggccctgctgtcaaaccaaatgcttggcaaacttgaggaagagccgggaggccaatgagggaggaggagagtatgagaggtgaggtcagagagggggcaataacgcaagtcaggtagggccttgtaggacactgtcaggatttggcttttaccaagagcaagatgagaagttgctagaaggttcggagcatagagtgatatgatctgacttcagttgaagaggaagctttgggactgctgtgttgagagtataccctgagagggcagacaatggaagcggctgaaagaccggttaggaagctcttgcaataatcctggtaagagatcatagttgcttgggccatgatgttagcaggggaggtgataagaagcagttggattccagaaatgttttaaagaatcgatatcacacagtttgctgatgaattagacattgaataagagaaagaaaaatcttaagaataaccttagaatgtttggcctgagctattgaaagtttggagttgccatcagtgtaagacaggaatcctgcaggtgaggctgactgggaaggaaagccttatagtttaaggtgtctacagatgttgcaagtagaaatgatgattaggcaattagatatatggacctggagttcagggaaaatgtatagcctgaagatacatatttaaaatttgtatgcgtttggttggtatttgaagccatgatactggaactagagaatgagtagcgacagaagaggattctctagactgaggcccagggtggaggattgttcaaagctccaggagatgagaagggaccagcaatgggaggagtggttaatgggtaaagcaagtactattattgagtaggataagactatctggaaacatggaggtcatcccattgatgacctggaagagagctgtttcagtggactggtgggggcaaaagcatgatggggtggattcaagaaagaggggaaggagaggaggtagagacaacaggaataggcaacgctttaggagtttggctgtaaagaggacatggaaatagcagatcatagagaatgtgacgcccagggagggacttctttttttaagatgggaaaaataacagcccattttatgttgacaagactaatccaggagaaaggaaaaattgatgatgcctagggagagaggacaattgctggagtaatgtctttgatgaagtgagagggcatgggattcaatacaaacatagagggactggcttcaggggactaaccaggtttgtttgtattaatagcagggagatagtgcatttgggcacagatgcaagtgggctggtaaatgggataatgggagtatgctttttctgattgatttttagtaaactatgaaaggagttcatcagttaagagtgagtataggggaagagtattggaggttttggaaggaagaaagcatgaatgagtcatatagccatccggcaggaagagtgagaacaaaaatgtcggagacaccaaaaatataggagacatgctagggggcataaaggaattatttgagtttttatgattatgagtttaaagaaatttgttttcttcagtcaccttcagctgcttaaacagggtggcaagttagattggaacagggttggggtataaccaggtgaatataatgaaagcaagagatgtggagtcaagggcaactgcagtgtgttaactataatgtttggtcatggaatctaagctgggtgtagaggaaagtgaggatttttagggaaggaggaacaatgaagcatattagaggcagaggattgagattcaagctgggatcactcagttagtgagtcagaagcaataacgtagaaattaggaggtgggttggagaggtggatgcttgaggttatggagggcttgcagttattggtggtttggggtctgttgttggggtggtgggctgagataagatagaggaaaaggttatagaaggagcaggggtcaaggaactgagaggccaggatatgggaattatatagatattgaagtcaacaaaatgttgacttccatatgataggaatgtaaattatgacaggaatgagggagagtgattcgagaacatttcaatcattgcatcaagtaaggggtgcagctagcctagtctgatgtgcatcaaagctggattttatggttgttgcatgttatttttttttaaaaaggagggaggatggtctggaatggcaatgaggggcaagaagggcatctccacctccaggccccagggcatgaggaaggtgcaagtggaaatgctcaccacctgggagtgattcagggtcctcaaagaggagccaggtttctgtaagagcaagaggaaaggaattgccagggttgtggctggtgatgaaccactgattcttaggcaggatttgggagttggtaaaggaagggaaatgagctgagatgggagatgtgcatgggtatctggggatgaaagtccaagtgataagagggactgggggtcttgggcttctcgtggtgattgccctaagcgaggctgtgggcatttggggttggccctaattgtctctatgtcagattgaggtggtgatgctgcaagtgcccggggcagggacttgatggcagcacatggaactctggtacctcttcctcagtcctgatatttgcttttttaacttctactaaaaaccccactgctaactgtgataggccacaacatgtttttatagatgtcaacaaatgttatcctggattgagaccacattttgactatttatcctggaaagtacacattttcacaggaaatcttgtcctttctaaggttcccaactaagctagtctcgttgtgggggggtcataattatttgttcttacttaccttactccttgttcatctttaaaaaaaaaatcaaataaaaaggattggaaagcaactttgcttctgcccaattctgctaaatgaaagttttctctgacagatcattttgattttgtattttcttttgtgacagaaacagtgggacaggagcatggaaatgaatgaaagtctttaaaagccttgagagagcgttttcaaggatcaggagagggcttagaaagaaaaggactctgagtggggctgcatgaaaagggggtaagtgaggactcttggggagggtctgaaaaaaacaagtagtttggcaaggagagcagaaaaataaaattccactgtgtaggcatttggagatttagcaagagcaacctagagtctgcccccagagacactgcacgttgtttctgacacagaggatgcactaattctatttcctgtgccacctgaaaaaatcataatttgagaagagaaactgttaggccatttctagtgaactatttttccaaaccctcacggaaccctgaacagggtgtgaatgagatcacaactactgctgctgctggttcagcctctctgtccactaataaaggcaaacccttcagcatggtcatatcctgccagccgttttcccccaaaagattaaattatgttcatcttggctcatctaacgccacatcttgagttcttaaggtatcacagccaactcagtcataccttactttatgcactgagtacgcattaaactctatttaggaaggaagagggaagcaaaggaagccagggatggttttgtcatgacctctctttgctttctgacctcccggaatccactctttggaagatgtgcagaaaacaatgtgacttccatttaccctgcctcagatctcccctccttcagactggctcccacccctggttaatggggtaacctgggtacgcctatttgttaaaggaatttgtgggaagtgaggggcaaaattgttggagcagagggaatagatttatgggagctttgttacccagtgactatcccagcattaatacttcagagtagccctgacgcttgtggaaacatttcaagggagctagaggcaatgttacagtggagatcagagaagggatggggcagtgagctcttgtccctaggggaaatctcttttcctccacgtgacaggagccagtgctccaacagcatcagaattacacttagccacaatgactgatgcgtgtgtgtgcctgtgcacatgtgtgtgagcgtgtgtgtgagcgcacgtgtgtaagggggtgatgatggaaacatgatatgcatccactatggggttgcgttgcaaattcacagctgcacccctcccaaagtcacatggcagaggggaaatggtcatagctttcctgtgtgatgtcctctccagggagcaccgacgactcaggcttgcctcagctctgcgaggcccagactccacactcctccctggggccggctctccttcctcttgactctcagatccccagcccatccacctccaagttctttttttgtttatttgttttgcttctgttttctgtaaatatctatttcttattttggacatgcagggatcaattgagattctggagtggggggaggggcggatgactgggtctttttattttttcctttctctcttggattttggtgtttgaacttgaaaaaaataattacaagtatatatataagcaaatgacttacctttaaacaaaagaaataagttgatttcattcttttgatttatcttgtttctcattggggtcgggtgggggtggggggtcttttgggtggagggcttttttgtgagctgtatagatttccagtttggacttgttcaaatgatgcaggaacaaaaattaaaacgaattaaaaaaaagacaacataaaaaaacaagaaaaactttgtgatgtataaaagctgtaaatagtcaaagattctttctcttttctaatggcaaattatttctgtcactttatattcaaaaaataaagaaacctaccacaaattatcagggttaaaaaaaatccagaatcagagtttttttcttggtctttgtgctttctttactgtgattccaaaaagattgttaaaagtgctgtttgggaaaaaccccttgcccagttggtttccaattgttggtaggagtcttggactggcgaatctacttgggttgggatctgtttctactatagctggtgctggagcccttggttacactcatctccccctcatgtattattctgaaacaaatcccataattatatggtttcatctgtaaacattacagtatatatctcttttactaaggactcttttttagtttaacaataccattgtgacatcataaggtagccataattccttgataagaaatatccagtgttcactaattgtctcaaatgtaatactgttttatggggtggtggtgggtttttttcccataagtcataaggtccatacaattagttgctatttctcaaatgtattttaaatctaaagatttgctttctaactttttcttgacatatacttgttaaaggaatagagcactttatcctttagaggttcccacagttggattttgctggttcttcccaatattaatgaagacaatgtaaattggtaattgttttactctttaatgcatacttccattgcttggaggtgtcagaaaagcaaaccagcccttgttttgctgattgtttcccaccccactcccagtcccagtcctgttactggctttatatatggattctaaatgatctctctttctataccttgattgctaaattatccaagttaaataatagtatctcccccttagctatcttggtaagaaaatagcatagacatatttagcttttcacatgccaatcatgaggcacatttcaacatcactttattaaaagccacatgctcctcctatagtcctagtactggaaaggaccttctagagaccatttagaagaactctgtctcatggccaaggagcctgggtgagctcatgtatggcagccctggctagaagccagcagggctaatccctagttccaggaatctcccaggataatgtattgttatctctttgaagttactgtctcagagagattatctgtgagggtctctcttgtactttcctttgtactgaacaaaaattcttgtttctccctgaacattccagaaagtagcaagctctaacataaagccagattcttcccagatatagtgattctctttacttctggagatacttccttaaaccccaaattttttttggacaacagaactgctttaacaataatctgaaaattatacagtaagtttgatttgaaaatctgagatttgtttaaaaaaaaaagggggaagacaagacttgaaatcttggctctgatttttctgttgtttttgtttttttgtttgttttttttttgtttgtttgttttttaagagggtcttgctctgtcatccaggctggagtggagaggtatgattacggctcactgcagccttgacctcccaggctcaagtgattctaccacctccgcctcctgtgtagctgggtactactggtgcataccaccacactgggctgattttgtattttttgtagagacggggtttcaccatgttgtccaggctgattctgaactcctgggttcaagtgatctgcctgcctcggcttcctatgatgctaggattacaggtgtgagccactgtgcccatcttggctctagttttaaataaggaagcttgcgagtatttatctggattatggtgggaacctccagtaggatatcatgaaagctttgatcatgatcacaacaccttcaataaaacaaagactccaatgacaagggtgagtgccagaacttcctgagactatgccaagtgtctgttctttatacagcctgcctcacccacacctggaatctcttaaatggattagctcagagcacctgtgtcctacatgcccttgtgccaccctgaagtccactgcaagggactatcagtaagaccagtctaatgaaaggctgagggagcacccggttgtgtccccatcagccaactgttccggaaagatgagcctccttggctgtcccaggattgacactcttcccctgcatacatcactaggaaggtagaacctaccctgaacacttgatttgaatatttctattcccctattcttttacaaatgcaaactaattctttcaaaaatataaatgatcctctgaaagaaatttcttgtggaattctggaatgaccaagaagatgggaagagaccaccagaaaagtggttctgagagtctgcagggcctgtcaaaaaaattatgccaaagctatcatttgtggcctgcatcaaatcatctagacttccgttttcttatcttgaaacccagatgttggtctatctgccctccccatcaaaggttacctggagcagtagttctcagttttacatagtggagtcatctgagtatttctgaaatgctgatgcctgagtctcatcccctagagagtctcattcaattgtcctgggtggctggaggggttaggggttgaaaacttgcccaggtgattttaatatacagccagaatgtgaaccactatgtatgtgcatctggggaaagcgggcctcctatttacttctaatcccattatatgtggcagctgtttgttgtcactctcctctcaccatggacaactattcacagcacagacagtcaccctttggaactccaggacctctttcctcttccatttggagctgaagaatggacataacggaagcaccattttatgattacagcctcgttctctaattctgcctatccccagcatacacggctagatatagacatactgcaaagctcctctatgtaaaggaaattctacacataaaatttaaacttggaatcgaccttaaatgtgactattctcatgattatgggaagaaaatcaaaactataaacttactccacaaggttggttcattggccataattcctggacttactcctcaatttaaaatctatgatcttctaaaaaggcaccttttttttcagctctacatagcctgggtcttgattctctaaccccctcagttagggaaacctatccacattgatgttctttgcctggaaattagtcccttcccctcttccaggcaaactctaggacactgtagttccctcaagcacatgccccatagtcggaataattgtctgacatcacagggggcttcatcaggacaacaaaaggtgggctttgctcctccacatccaatcttcttttagatgtgcccacgagagcagggggtatattttttcctggttgaccagtggacacctctggtattattccacaaataagggattctaaatcaaaggtcaaaaactggtgtcctgaagactgattctgacctcaaaatcagtcaggaaactggttttgtgagacgggcactgctttttgaatattcagatttgtgtgcctccagagagtatctgctctctagtttggggcagcccctaccatttcttatgacctgtctcacctcaggaagcaagtgagtctgcagtaacttcccctttcccaccactggccctcaacacacccacgtacacaggtcccttctcctagctgcagcaatagactcttcaaagccgtatttataccagagaaatagtatttcttctttcagagaaaagcagtgccaatttttttgtttttccttctgctgtcggtctaggtactgacgtccctcaaatgaataataaaacagccaccatgtgggggctattttattagtcattgatgggacctcagtacctcattaccatggggctacttacatggtgtctacactgcttagctatacacactctcgaaagctttgaacgtcaagattgttctctttctcttttgccttttcttgaaattaatgtttgtatagatttttctctaatcccactgcacacaacagtgtgattatttatcctatccaagaaacctctcagttatcagagaagaggaaatttttttctttcaagttacatccaaaataactatcatttaatgtgcacctaccatattctagtccctttcattcattatctcatgtgatcctcttaatacctcattttacaaatgttattacagtattgaggtttggagagatttgtcaacttgctcaaagtcatacagctattaagtgaaagatcagcagttcaaaaccagtgatgcacatttccaagctcttatcactcaaaccacctcacagatctactgcaaaaagtaaactagacaatgaacatgaagctattctgcaaactgtaaagtgctgaggataaatgtaatgtggtatcattctgtctagcaacaccttgatcattgacttgcccctttctgatgctcaacaattagttccttatactcccttaggcaccaatcttggcagatcttgtccctttgtaactctttgtgtttgagggtttttgctttgttcagagtatcacgttgggtagccattctgagaaagtcatgaagaaatggtctttgcaagagagaatcaccaccaccactgtcaacataaacattaactattggatacttaataatggccagcactgcactaaacattttacatatattgtcacatctgctgtttataataacgctggggaaaatgtatttccctcccaactcctcattttacaaaggaggaaatcaaggtgcagtgatgttacttagccagcttggagttgcacagtggaacagatctatcttaacccagaatttttctgttatggagcctttgaaggccacagtgctcctaaaaatgtcatttctgaggcagctttatttcttgtcaacgtctagtccagaggttttcaactctggctgtatattagcgttacctaaggagattttgaagttgcagatgctaaatactcagtaatttgtaaaaactctttggggggtgctcagctggagccagggctagaaacaagtggtctcagttaatgccagcaaaaatgaatcagggccaggagaagggaaagaggctggtgcaaatacctacagccagagggaatgcacagagggttcacagtaagaatataggaaacccagaaatattatttacccaatatgtcctttgaggtgtgtcagttactaatctggggcttccacattcacccgtgtccttcttgccttactttgtgatcctggtggtctctgtaagctacagctctcctttgccagcctctctatgctaggctctgccaatagagggcgccagagggagcctgggagactggtggatgaaaggttttttgttttgttttgttcagttagcaagccagcccctctgtgggcatctggctcctgacgtctccctaactctcgtgggcagttcccccatcccaggatggctttctgcccgtttctttcttgtgcagcagccatgcccttgccatggtcttagtcttgaatctcagccttgcagagctcccctctcagcagaaagtcccttccttgttcacgttccctctatcccagagtggaagtcattctctgtagttgctactcacattacaactcagggttctctttcaccctttcacaaaaccattatgcagttaacaattccttaacttttccctgctcaaattcttgctttggtcagttgcctcaactggaccatggcaggtatattggaacactctctttataactctgctgtcagatcacaaagtgagatgaaggaaaagtttgcacaggctcccctcatgaagcctgggagagcatgcccctttaaggaatgggatccgtttcaatgattctggttaagaaaaggctgcatgagctactggcgtatttattctgtaaccaaccgctaatgccagactttttctttgctttcattgctatatcacaatggtaaaagaattgacttaattaatttgcagcctgtacataatgagaagaatatttcctgacagctttatagagaggatgatagttacataacattagttacataatatataatttataatttattttctataaaactcatttaataataatatcacttatataagtagatgcttgtatatctatctgctttatatttattctgttggttgtggtggcagtggaggaaaaaaggatatcttcattattttgtctgtgtagcttttttcttaggataaacctactggcagattttgataaagctgttctgatctaagtt

SEQ ID NO: 68 - DNA, 51000 bp, Homo sapiens
gtttcaccttgttagccaggctggtcaccaactcctgacctcaggtgatccgcccacctctgcctcccaaagtgctgggattacaggtgtgagacagctgtgagccaccacgcccggcgcattttttttttcttttttttcagagggagtgtccctctgtcacccaggctgaagtgtagtggcgtgatctcggcccactgtaacctctatctcccaggttcaagtgattctcctgactcagcctcccaagtagctgggactacaggcgcctgctaccatgcctggctaatttttgtagttttagtagaaaccgggttttgccatgttggccaggctggtctcaaactcttgacttcaggtgatccacctgccttggccttctgaagtgctgggattatagggcatgagccactgtgactggccatcttaaattttttttttttttttttttttttttgagacagggtttcactctgtcgcccaggctggagtgcaaaggcgcgatcttggttcactgcaagctccgcctcctgggttcatgccattctcctgcctctgcctcatgagtaactgagactacaggcgcccaccaccacgcccggctaatttttttgtatttttttagtagagatggggtttcaccttgttagccaggatggtctcgatctcctgacctcgtgatccacccgtctcggcctcccaaaatgctggcattacaggcgtgagccaccgcacccagccttaaatttttttttaagggaaatcaaacccagtgatattgggccagtacagtggctcacacctgtaattccaccactttgggaggctgaggcaggtgaatcacctgaggtcaggagttcgagaccagcccggcaaacatggcgaaaccccgtctctactaaaaataagaaaattagccgggcgtagtggcatgcacctgtaatctcagctactcgggaagctgaggcatgagaatcgcttgaacctgggagcaggatgttgcagtgaaccgatatcacaccactgcactccagcctgggtgacagagcaagactctgtctcaaaaaaaaaaagaaaaaaaaatccagtgatacttactttttaaatttttatttacttattttttgctttaagttgaatctttaaacttatctttatttttgagacacagtctcactctgtcgcccaggctggagtgcagtggtacaaccacagctcagtgcagcgttgacctcctgggctcaagccatcctcccgcctcagcctcccgagtagctgggactacaggcgcacacaaccatgtccagcttatttttgtattttttgtagagacagggtcccactgtgttgccctggcttgttctgaactcctaggctcaagtgatccccccgcctcaccctcccaaagtgctgggattacaggcatgagccaccacatccagacttcacttttttgtttaatgtcgcaaatggcataaggaatgggattcaatggggacacatttataaacgttgcagcagctcctagaacttgcctatccttgtaaacttctctaggtgattgctaattacttctttttttttttttttttttgagacggagtctcactctgtcgcccaggctggagtacagtggcgcaatctcgtctcactgcaaactccacctcccgggttcacgccattctcctgcctcagcctcccgagtagctgggactacaggcacccgccaccacgcccggctaattttttgtatttttttttagtagaggtggggtttcactgtgttatccaggatggtcttgatctcctgacctcgtgatccacctgcctcagcctcccaaagtgctgggattacaggcgtgagccaccatgcccagcccgctaattatttcaatttgaccttgacactgagcctgccaagtaggttcaagcattttgatggcccctttacaggttgggaaagctaatttatctgtccaaggccgaattctgaaactgagtcttaactgccaaaaattcttatcatcaatttcttcttctgggttgggcacagtggctcatgcctgtaaagccagcaatttgagaggcatcatgatgcaagaggaagaggattgagtgaagctaggagtttgggaccagcctgggcaacatagtgagaccccatctataaaaaaaaattaaaaattagttgggcatggtggtgcactcctgtggtcctagctattcaggaggctgaggtgggaggattccttgagcccagggttgacgctgcagagagctgtgatcacgccactgcagtccagcctgagtgacagctggaaataatgataaataaataataaataattatttaaaaaattataataaaaataattaaaaaattattttccctgattaatctttttttttgtccttctgagagttcaatttgtcccttttctgcctggtctcctaggtttccctaaaatcctgctgagaggttagcactgcctgccaaagtcagtttgcaaaatcccagagaaatccagcttattcctgggggaaccgccaagactgcccagccctgtgtggggttcaggcaagtttctcacatgtgcctttttggcaagaggcctctggcaaccccatgagtccccaaagagactcaattctaaaagttggtctccaccagctctctgtggcttaggggttcaagttcaactgtgaaagccctgttttgttttgattttgctttgagggagaggaaaccgcccttctgtttgttcaactccttctcctaaggggagaaatcaatatttacgtccagactccaggtatccgtacaattgatttttcagatgtttatactcagccaaaggcgggatcccacaaaacaaaaaatatttttttggctgtacttttgtgaagattttatttaaattcctgattgatcagtgtctattaggtgatttggaataacaatgtaaaaacaatatacaacgaaaggaagctaaaaatctatacacaattcctagaaaggaaaaggcaaatatagaaagtggcggaagttcccaacatttttagtgttttccttttgaggcagagaggacaatggcattaggctattggaggatcttgaaaggctgttgttatccttctgtggacaacaacagcaaaatgttaacagttaaacatcgagaaatttcaggaggatctttcagaagatgcgtttccaattttgagggggcgtcagctcttcaccggagacccaaatacaacaaatcaagtcgcctgccctggcgacactttcgaaggactggagtgggaatcagagcttcacgggttaaaaagccgatgtcacatcggccgttcgaaactcctcctcttgcagtgaggtgaagacatttgaaaatcaccccactgcaaactcctccccctgctagaaacctcacattgaaatgctgtaaatgacgtgggccccgagtgcaatcgcgggaagccagggtttccagctaggacacagcaggtcgtgatccgggtcgggacactgcctggcagaggctgcgagcatggggccctggggctggaaattgcgctggaccgtcgccttgctcctcgccgcggcggggactgcaggtaaggcttgctccaggcgccagaataggttgagagggagcccccggggggcccttgggaatttatttttttgggtacaaataatcactccatccctgggagacttgtggggtaatggcacggggtccttcccaaacggctggagggggcgctggaggggggcgctgaggggagcgcgagggtcgggaggagtctgagggatttaagggaaacggggcaccgctgtcccccaagtctccacagggtgagggaccgcatcttctttgagacggagtctagctctgtcgcccaggatggagtgcagtggcacgatctcagctcactgcaacctccgcctcccgggtttaagcgagtctcctctctcagcctcccgaatagctgggattacaggcgcccaaccaccacgcccgcctaatttttgtatttttagtagagacgggttttcaccattttggccaggctggtctcgaaccccgacctcaggtgatctgcccaaaagtgctgggattacaggcgtcagccaccgcgcccggccgggaccctctcttctaactcggagctgggtgtggggacctccagtcctaaaacaagggatcactcccacccccgccttaagtccttctgggggcgagggcgactggagacccggatgtccagcctggaggtcaccgcgggctcaggggtcccgatccgctttgcgcgaccccagggcgccactgccatcctgagttgggtgcagtcccgggattccgccgcgtgctccgggacgggggccaccccctcccgcccctgcccccgcccctttggcccgccccccgaattccattgggtgtagtccaacaggccaccctcgagccactccccttgtccaatgtgaggcggtggaggcggaggcgggcgtcgggaggacggggcttgtgtacgagcggggcggggctggcgcggaagtctgagcctcaccttgtccggggcgaggcggatgcaggggaggcctggcgttcctccgcggttcctgtcacaaaggcgacgacaagtcccgggtccccggagccgcctccgcgacatacacgagtcgccctccgttatcctgggccctcctggcgaagtccccggtttccgctgtgctctgtggcgacacctccgtccccaccttgtcctggggggcgccctcgccccaccagccccgatcaagttcacagaggggcccccggccaccctcaaggcctcggttccttacgaggttgaaacgttgcctcagaatctccccgcccctccttggtctgcagccgagatcttcagccacggtggggcagctatcccccgggaccgaccccctggggtggcctcgcttcttcagaggctgtgaatggcttcggttcagctgtccaagcggcgatttttcctctgggtgaaatggattagattttagatttccacaagaggctggttagtgcatgatcctgagttagagctttttaggtggctttaaattagttgcagagagacagcctcgccctagacaacagctacatggccctttccctcctgagaaccagcctagcctagaaaaggattgggattgcctgatgaacacaaggattgcaggaaactttttttttaattggcaagggggttggctttgactggatggagagctttgaactgccttgaaattcacgctgtaactaacacaccagtttcctctgggaggccagagagggagggagggtgtaatgaaatacggatgattgttcttttatttttatttacttatttattttttaactttttgtagagatgaggtctcgcttggttgctcaggctggtcttgaactcctggcctcaagcgatcctcctacctcagcctcccaaagtgttgggattacaggagtgagccaccgcgccccaccggggatgatgatgattgcaaacattctgccactcagttttacaaaagaaagagaggcactggattaatgtgtatctcactcaccaatcaacctcttccttaagagaaaatgttaaggaagtcttaggcaaggccttgtttgttcatcactttagtttctctctcccgggatggctgagaatgtgatgtttcctctgttgtcaaggagactacacccctgatgttttcctccagacttctgagagctggtgtgtgtttctagcactttctagctgcaccacctcacgctgtagctggcttcaaggcatatccaggggggagtttcttgtccatttcctttacaaagggaagttgttggaatctgaaccgcaagccttcacttagaccaaaatcaggcaacagcggtgagcgcagctccaaacgtgtcaatgactcacccaaatttgagtaagggagttggctgctttaacgagccgcagggtgattcccttgtcatttccggaaatacctatcttccagggaacactgggaaaaaacagggagacctttgttgagacagaaaacctgtaggggaattctgttcctcattcctgctcttatctgtagacttcctccctgataagatccaattctagatgggtcggttgctccttgctttgatgggtgctttgatgggctttattattattattattattattattattattttgatgggctttttgatgtcccttttccttccacactctgtcccaactgtcaagcaaatagccttttgttgctaagagactgcagatgtaaccgaccagcagcaaacagtgagtcaggctctctcttccggaagcaaaatcaattgctgagatcactctggggaaaatacccaccttatttggaaagaagcactgatcaattgatgtctattttttttttttttgagttggagtctcgccctgtcacccaggctggagtgcaatggcataatctcgcctcactgcaatccccgcctcccgggttccagcaattctcctgcctcagcctcctgagtagctggaattataggcgcctgccacaacacccggctaatttttgtatttgtagtagagatggggtttcaccacgttggccaggctggtctcgaactcctgacctcgtgatccacccgcctcagcctcccaaagtccaaggattgcaggcgtgacccactgtgccagccaatcaattgatttctcattcattttcagctggctctgttcccttaagccaggggattttcgtttgtttgtttccccttcaaggaaatgattctagctacagttttgatttccttgtacaactgttttcagtagcacagggaaagaaaacatcgaaagcattcaccacctcatttgtgtgctgggggaaaaagcagaaatgtgtattctctttttttgtttcgatgaccttgttcctgacttgttactcgtgacttgagagatcagagggctagaggactagaatttatagaggtgttttttttgtttgtttatttttgttcgagttgcccaggctggagtgcagtggcgcaatctcggctcactgcaacctctgcctcccaggttcaagcgattcttcggcctcagcctcctgagtagctggaactacaggcgcccgccaccacacccagctaatttttgtatttttcagtagagatgggatttcaccatattggtcaagctggcctcgaactcctgacctcgtgatccacccgcctcagtttcccaaagtgctgggagtacaggcgtgagccgccgtgcccggcctttttgtgtttttgtgtttttgagaggagctcattgctttttaggcttccctagcgtgagaaaatctggggatccatgctctagtttacttcctttttttttttttttttgagatggagtctcgcttagattgcctaatctcagctcattgcaacttctgcctccggggttcaagggattctcgtgtctcagcctcctgggtagctaggatacgggcacccgctaccatgcctggctaattttgtacttttagtagagacagggtttcgccacgttggccaggctggtctcgaactcctgacctcaggtgagccgcctgccttggcctcccaaagtgctgagattacaggcgtgagccaccgcgcttggcctaatttgcttttcctgaaattcaaatggtctaatatgaaaaacgccaaccttgcttgaaagaataagaaagaggtgcggtttcgttgggccgttgatgtttggaacaggactggttttgtccccttgctcggaaagggcagcaactgtgaggacagctccctgacgtgctctcactcagcactgttccgttcctgagcactgtccccactagctaggccaagggagctcatttggcaggcaactgctgtctggctgcgcctgtggcagtaaaatctgcctttattttttggaggcagggtcttgccctgtcgctcaggctgaagtgtgcagttatagctcactgcagcctccagcttctgtactcaactgatcctcctctctcagcctcctgagtagctgggactatacgcacgtgttaccactcccacctcagtttgtttgtttatttatttatttatttatttattgagatggagttttgctcttgctgcccaggctggagtgcaatggcgcgatctcggctcaccgcaacctccacctcctggttcaagcgattctcctgcctcagcctcctgagtagctgggattacaggcatgcaccaccacgcccggctaattttgtatttttcgtagagatggggtttctccacattggttcaggctgttctcgaactcccaacctcaggtgatccacccgcctcagcctcccaaagtgctgggattataggcgtgagcccccgaacccggccactcccagctaagtttaaattttttgtttgtttgttcgtttgtttttattttttgagacagagtctcccgcccaggctggagcgcagatcactgcatccttgacctcccaggcttaagccatcctccccactcagcctcccaagtagctgggattacaggtgtgtgccactatgcttggctaagttgtgtattttttgtagagatggggttcaagggattctcgctttgttgcctcggttggtctcaaactcctgggctcaagcagtcctccctcctcagcctcccaaggtgctggggaaatccacttttgaaacattgtctggagagttgcccaggtggtagatcacagaaataggtcatcgtggggtccttcccatgggtgcagtcttgagccacctgtggccagcaaatatttggagaataatagtcaggggagagcttgaggtccagggaaaggttttgtttttcttcagggaaaggtttttattgttctttatccctccttaaaggaccttcaggtgttactgacattcccggtctacccagtggcacatttagtttgtaagctgggccctcgtacagaggtagggaggtgagagcattggattagtggtcaccaaagctgcggtcacctagtggggtgatcagaggctcctcccttaagatcttgattgccaacgcctctggcccaactttcctttttatttatcgcaagcctcctggaatctcaattgctttttgcccacccggtgtgtcagcacaagaaatgagtcatttcctcctttaagcacagttgaaattgagctgtgagtcagtgaggtgtgtacgatattgtcaaagcggggtgtgtacagtattgacagatctgtagttgggcaagagaattatcagagtttgtgaccacagcagattccaaagctcgactcattttcttctctcttccttcccttttttcttttctttttttttttttttttgacagagtctcgctctgttgcccaggctggagtgcagtggcacaatctgggctcactgcagcccctgcctcctgggttcaaatgattctcatgtttcagcctcccgagtagctgcaattacaggcattcgggttcaagtgattctcctgcctcagccacctgagcagctgggattacaggcgcccgccaccacgcccggctaatttttgtatttttagtagagacggggtttcaccatgttggccaggctggtctcgaactcctgaactcaggtgatccgcccacttcggcctcccaaagtgctgagattacagacgtgagtcaccgcgcccagcctgttctgttctttaattctcaaaacaccctctaggaagtagagactgccattctcccccattttacagatcaggaaactgagtcccagaaggatttagtcagttacccaagttgttctagttaaatggcctggaaagccagtgaagcccaggattgtctatctaacccccttactactctaactttcagggaatccacatgaatgtgctgggtcaaccatcaaagttgaaatggataaagggggctggatgcggtggctgatgcctgtaatcctagcactttgggaggccgagatgggtgggtggattgcttgagcccaagagtttgagaccagcctgggcaacatagtgagacacctgtctctgcaaaaaataaataaaaagttagctgagtgtgatggtgcacccctctagtcacagctgttgagttaggcttaggcaggaggatcgcatgaacctgggaggtggaggcggccgtgagcctcagtcatgccactgcactccaacctgggcaacagagtgaaagccggtgtccgaaagagaaagaaaaaaagacatagatacatcttttaaagttaggttgtatgttaattacctacaactcagtttcaactgtgcttaaaggaggaaatgactcatttcttgctacatatcaaattagcccaaaatgtagtggcttaaaacaacacatttatgatttctcagtttttgcgtgtcaggaatttggaagcagcacagctagacggttccagctcagggtctctcatgaagttgcaatcaaaatattggcaggagagaaaaacatattttcagaagctgcaggcataggaagacttggctggggttgaaggatccacttccaagatggcgcactcagtggctcttggctggaggcctcagttccctgctgcgtggagctctccctccagctgcttgagtggactcatgacatgcagctggcctcccctggagcagtcgatccaacaatgagcatggccatgaactaggctcagaagccactccctgtcgtctctacattttcctatcagaagcaagtcattaaaagtccagtgccactccaggggagacgaattaggctctgccttctgaaaggattatcacagaagatgcggtcctatattctttttttaaaattattcttttttttattttgtagagatggggtcttggtatgttgcctaggccagtctggaattcctgggctcaaacaatcctgtctctgcctcccaaagtgttgggattacaggcatgagccactgcacctggtcatgtggtcatattttctttttcttttttttttttttttgagacagagtctctgtcgcccaggctggagtatggtggcgtgatctcagttcactgcagcctccgcctcccgggttcaagcgattctcctgcctcagcctcctgagtagctgggattacaggcgcccgccaacatgcccagctaatttttttagtagagatggggtttcaccatgttagccaggatggtctcgatctcctgatttggtgatccgcccaccttggcctcccaaagtttcaaccatcgatcagaacttattgatgtacttatgtagctaggcacggtggcgcgtgcctgtaatcccagctacttggaagggttaaggcaggagaatcgcttgaacctgggaggcagaggttacagtgagtcaagatcataccattgcactccagtctgggcaacagaatgagactctgtctcaaaaacaaaaaacaaacccttgtatgtgattttcctggatagcatctgttacatcttcacaaagataaaaagtcagacttggctgggcatggtggctcacacctgtaatcccagcactgagaggctgaggcaggcagatcacttgaggtcaggaatttgagaccaggctgggcagcatggtgaaaccccgtctctacaaaaaatacaaaaattagccgggtgtggtgtcacgcacctgtattcccaagctactcaggaagctaaggcaggagaatcacttgaacccagaggtggaggtttgcagtgagttgagattgtgccattgcactccagcctgggcgacagagtgagactctgtgtcaaaaataaaataaaataaaattttaaaaaaggcagatttttttttcttcttggtattgttaccttattatagtaataataagtgcatagtgcatgctgagataagcaatcataatttgttattgcggccgggcatggtggctccagcctataatcccagcactttggtcaggagttcaaggccagcctggccaatatagtgaaactccatctctactaaaatacaagaaattacctgggcatggtggcagttgctggtgatccccagctacttgggaggctgaggcaggagaatcgcttgaacctgggaagcagaggttgcagtgagccaagattgcaccactgcactccagcctgggtgacagagtgagactctgtctgaaaataataataataataatttgttattgcttttattgccttagtttacatagggaatcaaagtttatactttgatttataaaagttgctttgattctagttcacagaaccagaatctttcatataaaggtattagagggcccagtgtggtggctcatgcctgtaatcccagcatattgggaggctgaggagggaggatcactttaggagtttgaggccagcctaggcaacatagtgagaccttgtctctacaaaaaattccaacattagctgggcatggtggcatgtgcctgtagtcccatttatttggggggctgaggcaggaggatcacttgagcccacgaggttcaatccaggttgcagtaagccatgatcctgccactgcactccagtttgggtaacagagcgaagctatgtctcaaaaaaagaaaaaaaaagtattctaaatccaaatttaatatataaaactaaatgcaggccaagtgtggtggcatatacctataatcacaacactttgggaggctgaggtgggaggattgcttgagcccaagagttcaagaccagcctaggtaacacagtaagaccccatctctacaaaaagtagaaaaattagcctggcatggtggtgagtgcttttaatcccaactacttagggggctgagatgggaagattgcttgagcctcagagtttgaggctgcagtgggccgtgatcgctccactgatcgctctaaagtgagaccctgtctcaaaaaaaaagaaaatagaagaaaactaaatacattcaataagactttgatctcttttccaaggtgtaaatatattttgggaaattttccagttactttgttctcattttaatgtaataatctaagtcttggttttctaaggaaaagttttctcttattatatcttttgttaatgtttctctcccatttcttttgatctgatcttcagatacatgattatcttcactgctaaatttgtgttctctggcctctacatttataatttctcataattctttatctaagtatttcttccctacctactgaagaaaactcaagttttcttccaccttaatgattatgctgtgtctgtgagttttcttcatgactctttacagtacaagttttttgtttttgtttttttaatggtcagatggatagaacaacacaggttttgtttgttttgttttaacttttaaaaaaattataatagataaagggtctcactacgttgtccaggctgatctcatactcctgggctcaagcaatccacccacctctgcctcccaaagtgctgggattacagtcatgagccaacatgcctgggcagtacaggttttttttgagacggagttttgttcttgttgccgaggctggagtgcaatggcacaatcttggctcaccacaaagtctgcctcccaggttcaagtgattctcctgcctcagcctcctgagtagctgggattacaggcatgtgccaccacgcccagctaattttgtatttttagtagagacggggtttcaccatgttggccaggctggtttcgaactgctgacctcaggtgatctgcccacctcggcctcccaaagtgctgggattacaggcatgagccaccatgcccagctgtagtacaggttttaatatgctaaatactcttcctttctttattaatgtgcatggaagttctaatatttttttcccataccccagagagtccatattttggaatcaacaacactagcctttgttgacaagtgtctctcttgggttccttctttgtgtcctccactgaattttggggttcataaaatttcatttgttgtgcttgcttaattccctgggaatcagactgttcctgatcggatgacatttctggttaattctttagttggcaggaaatagacacaggaaacgtggtcagtttctgattctggcgttgagagaccctttctccttttcctctctctcagtgggcgacagatgcgaaagaaacgagttccagtgccaagacgggaaatgcatctcctacaagtgggtctgcgatggcagcgctgagtgccaggatggctctgatgagtcccaggagacgtgctgtgagtcccctttgggcatgatatgcatttatttttgtaatagagacagggtctcgccatgttggccaggctggtcttgaatttctggtctcaagtgatccgctggcctcggcctcccaaagtgctgggattacaggcaccacgcctggcctgtgacacgattcttaacccctttttgatgatggcggctggaaaagtggccagtggattttgatgtattcaatcatgaattaggaggtggggagagaatgaattattggagctttccttaaagccattaaatggctctattgttttttcaattgatgtgaatttcacataacatgaaattaaccagctcagtggcattaatacatctgcaatgctgtgtggccaccacctctatcttgttccaaaactttgcataacctaatgtctttttttttttttttttttgagacggagtctcgttccatcacccaggctggagtgcagtggtgtgatctcagctcactgcaacctccgcctcccaggttcacgccatcctcctgcctcagcctcccgagtagctgggactacaggcaccctccaccacatccggctaattttttgtatctttagtagagatggggtttcaccatgttagccgggatggtctcgatctcctgacctcgtgatccacctgcctccgcctcccaaagtgctggcattacaggcgtgagccaccatgcccggcctatttttttttttaagagatggagtctaattctgttgcccaggctggagtccagtggtaccatcatacttcactgcagccttgacctcttgggctcaagtgattctcttgcctcgaactcccaaagtattgggattacaggtgtgagccaccgcactcagcctaatgtccagtttttaacaagctccatttaaatgccctccgttttgacccataaaggggtaggcttggccgggcacaatggcttgtgtctgtagtcccagctacttgggaggctgaggcagaaaggcagaaagattgctttataaagcccaggagtttgagggccacctgggtggcatagctagacctcatctctaaaaaataagtaataaataaatatttgtttttgtttttttctttttcttttcttttttttttttttttgagacggagtcttgctctgttgcccaggctggagtgcagtggcgcgatctcagctcactgcaagctgtgcctcctgggttcatgccattctcctgcctcagcctcccgagtagctgggactacaggcgcccactaccacgcccagctaattttttgtatttttagtagagatggggtttcaccacgttagccaggatggtctcaatctcctgacctcgtgatccgccagctttggcctcccaaagtgttgggattacaggcgtgagccactgagcccgccccatatgtatgtatatatatatttttttaaaatgggagaccaggcatggtggctcatgcctagaatcccagcactttgggaagctgaggtaggcggatcacttgaggccatgagtttgagaccagcctgctcaacatgatgaaacttctatctctactaaaaaaaaaagtgggattaggtcaggcacggtggctcacacctgtaatcccagcactttcagaggccgaggcaggaggatcatgaggtcaggagatcgagaccatcctggctaacacggtgaaaccccgtctctactaaaaaaatacaaaaaattagccaggcgtggtggcgggtgcctgtagtcccagctactcaggaggctgaggcaggagaatggcgtgaacccgggaggcggagcttgcagtgagccaagatcgtgccactgtactccagcctgggcgacagagcaagactctgtctcaaaaaaaaaaaaaaaagtgggattgacattctcttcaaagttctggggttttcctttgcaaagacaggattggcaaggccagtgggtcttttttgtgtgtgtgtgtgtgacggagtctcactctgccacccaggctggagtgcaatggcaggatctcggctcaccgcaacctcctcctcccaggttaaagtgattctcctgcctcagcctcccgagtagctgggactacaggtgcccgccaccacacccaactaatttttgtatttttagtagagacagggtttcactatattggccaggctggtcttgaacccctgacctcacgtgatccacccgccttggcctcccaaagtgctgggattacaggcgtgagccactgtgctcggcctcagtgggtctttcctttgagtgacagttcaatcctgtctcttctgtagtgtctgtcacctgcaaatccggggacttcagctgtgggggccgtgtcaaccgctgcattcctcagttctggaggtgcgatggccaagtggactgcgacaacggctcagacgagcaaggctgtcgtaagtgtggccctgcctttgctattgagcctatctgagtcctggggagtggtctgactttgtctctacggggtcctgctcgagctgcaaggcagctgccccgaactgggctccatctcttgggggctcataccaagcctcttccgcccttcaaatccccccttgaccaggaggcattacaaagtggggatggtgctacctcttcgggtttgtcacgcacagtcagggaggctgtccctgccgagggctagccacctggcacacacactggcaagccgctgtgattcccgctggtcgtgatccccgtgatcctgtgatccccgccccgtgaggctgaacacatagtgacgcttgctagccaagcctcaatgacccacgtaacatgaagggggaaaagccagaaagttctgccaaggagcaaggccaagaatcccgaagggaaatggactttgaagctgggcgtcttcttggctgtcttaatacaagtggcacatccaaatccaaaaccccgaaattcaaagtcttgagcacccgaaattctgaaacgtcttgagcactgacctttagaaggaaatgcttattggagcattttggatttcggatttttaccactgagtgtggagtcctaattaggaaaaaaaccaggctgaccgaaccaaaggaaagcaataaaagaaggcagatagggtcaggcacggtggctcacccctgtaatcccagccttttgagaggctgaggcgggtggatcacttgaggtcaggagttcgagagcagcctggccaacacggtgaaaccccatctctactgaaaatacaaaaactagccaggtatggtggcgtctgcctgtaatcccagctactcgggaggctgagacaggagaatcacttgaacctgggaggcagaggttgcagtgagccaatatcacgccattgcactccagcctgggggacaagagcgaaattctgtctcaaaaaaaaagaagaagaaggccgacaaactatgtaactctgcctttctccatggtccagaacacacagccctcctgcgtaaataactccttatcttcctgctcccagctatcatcagacacctcggctgatagaaaattgcaagttagctcactgcaacctcggcattataagtactgcacaaagccctcttcagcgcacagcacaagcaccattctataaaatctccagcaagcggccaggtgcagtggctcatacctgtaatcccagcattttgggagactgaggcgggcggatcacctgaggtcaggagtttgagaccagcctggccaacatggtgaaaccccgtctctattaaaaatacaaaaaaattagccaggcgtggtggcaggtgcctgtaatcccagctacttggaaggctgaggcaggagaatcgcttgaacccgggaggtggaagttgcagtgagccgagatcttgccatcgcactccagcctgggggacaagagtgagacttcgtctcaaaaaaaaaaaaaaaaattcccagcaagcctttgtcttctggcagtcagctcctctcttgctgacctgctcattgctttcttgcaaggtattttcctacctactttctggaataaatctgtctttctgtacttacaactaccttttttaaaatttctttcttttttgagatggagtctcactctgtttgcccaggctggagttcagtggtgcaatctcagctcactgcaacctctacctactgggttcaagcgattctcctgcctcagcttcccgagtagctgggattacaggcgtgcaccagcacgcaggctaatttttgtatttttagtagagacggggtttcaccatgttggccaaggtggtcttgaactcctgacctcaagtgatcctcccacctcagcctcccaaagcgctaggattacggccatgagccactgaggccggctgcacctacaactgtcttgataaattcttacccccacaccactggtccagatagtcagtgctcacccacaacattaaggatattccaaatttgaaacattccaaaatcagaaaaatattccaactctgaaaatattccaaaatccaaaaaaattcaaaatccaaaacacttctggtcccaagcattttagagaagggatactcaacccaaaataaggacagcaattctataaattgtgctaccatcttgcaggtctcagtttaacagctttacacctattagcgcaccagtgctcatagcagtgctgggaaatgtgtacagatgaggaaactgaggcaccgagagggcagtggttcagagtccatggcccctgactgctccccagcccgcctttccaggggcctggcctcactgcggcagcgtccccggctatagaatgggctggtgttgggagacttcacacggtgatggtggtctcggcccatccatccctgcagcccccaagacgtgctcccaggacgagtttcgctgccacgatgggaagtgcatctctcggcagttcgtctgtgactcagaccgggactgcttggacggctcagacgaggcctcctgcccggtgctcacctgtggtcccgccagcttccagtgcaacagctccacctgcatcccccagctgtgggcctgcgacaacgaccccgactgcgaagatggctcggatgagtggccgcagcgctgtaggggtctttacgtgttccaaggggacagtagcccctgctcggccttcgagttccactgcctaagtggcgagtgcatccactccagctggcgctgtgatggtggccccgactgcaaggacaaatctgacgaggaaaactgcggtatgggcggggccagggtgggggcggggcgtcctatcacctgtccctgggctcccccaggtgtgggacatgcagtgatttaggtgccgaagtggatttccaacaacatgccaagaaagtattcccatttcatgtttgtttcttttttttcttttctttctttattttgtttttgagatggagtctcactctgtgatttttttcatctctaaatttcctacatccatatggccaccatgaggccccaggctggccgatggttgctgttagcttattgggaaatcactgtttggaaggtgctggttgttttttgttgtttgttgtttttgtttttgtttttgttttgagacggagtctcgctctgtcgccagggtggagtgcagtggcgcgatcagctcactgcaacctccgcttcctgggttcaagccattctcctgcctcagcctcccaagtagcgcggattacaggcatgtgccaccacctccggctatttttttttctatttagtagagatggggtttcaccatgttagtcaggctggtcatgaactcttgacctcaggtgatccacccgcctcggcctcccaaagtgctgggattacaggcgtgcactgctgcacccagcctttttttgtttttttgagacagggtcttgctgtcacccaggttgaagtaaggtggcacgattatggctcactgcggccttgatctccttggctcaagcgatcctctcacttcagcctctcaagcagttggaaccacaggctgtaccaccaagcctggccaatttttttgtacagacacaggctggtcttgaactcctgggctcaagcaatcctcctgccttggcctcccaaagtgctgggattccaggcatgagccgctgcacccggcaaaaggccctgcttctttttctctggttgtctcttcttgagaaaatcaacacactctgtcctgttttccagctgtggccacctgtcgccctgacgaattccagtgctctgatggaaactgcatccatggcagccggcagtgtgaccgggaatatgactgcaaggacatgagcgatgaagttggctgcgttaatggtgagcgctggccatctggttttccatcccccattctctgtgccttgctgcttgcaaatgatttgtgaagccagagggcgcttccctggtcagctctgcaccagctgtgcgtctgtgggcaagtgacttgacttctcagagcctcacttccttttgttttgagacggagtctcgctctgacacccaggctggagtgctgtggcacaatcacagctcacggcagcctctgcctctgatgtccagtgattctcctgcctcagcctcccgagtagctgagattaaaggcgtataccaccacgcccggctaattttttgtatttttattagagacagggtttctccatgttggccaggctggtcttgaactcctggtctcaggtgatccacccgcctcggcctcccaaagtgctaggattacaggtgtgagccactgcgccaggcctaatttttttgtatttttagtagagatgcggttttgccatattgcccaggctggtctcgaactcctgggctcaagcgatctgcctgccttggcctcccaaagtgctgggattacaggcacaaaccaccgtgcccgacgcgttttcttaatgaatccatttgcatgcgttcttatgtgaataaactattatatgaatgagtgccaagcaaactgaggctcagacacacctgaccttcctccttcctctctctggctctcacagtgacactctgcgagggacccaacaagttcaagtgtcacagcggcgaatgcatcaccctggacaaagtctgcaacatggctagagactgccgggactggtcagatgaacccatcaaagagtgcggtgagtctcggtgcaggcggcttgcagagtttgtggggagccaggaaagggactgagacatgagtgctgtagggttttgggaactccactctgcccaccctgtgcaaagggctccttttttcattttgagacagtctcgcacggtcgcccaggctggagcgcaatggcgcgatctcggctcactgcaacctctgcctcccaggttcaagtgattctcctgcctcagcctcctgagtagctgggattacaggcgcccaccaccaagcccgggtaattttttgtatgtttagtagagatggggtttcactatgttggccaggctggtgttgaactcctgacctcatgatccgcccacctcggcctcccaaagtgctgggattacaggcgtgacccaccccatgaaaaaaaattaaaaaatgaagcgatgctgggcgcggtggatcacgcctgtaatcccagcactttgggaagctgaggcaggcagatcacgagggcaggagattgagaccatcctggctaatacggtgaaaccccatctctactaaaactacaaaaaattagccgggtgtggtggcaggcacctgtgatcccagctactcaggaggctgaggcaggagaatcgcttgaacccaggaggtggaggttgcagtgagccgggatcacaccattgcactccagcctgggtgacagagtgagactctgtctcaaaaaaaaaaaaaaaaaaaaaagcgaattctgaaatacatgaattcttttccttagatgcctgcttctgtcttgaggtttgttgttgttatttcgaaacagagtcttgctctgtcgctcaggctggagtgcagtggcatgatcttggctcaccacaacctccggctcccaggttcaagcgattcttctgcctcagcctcctgagtagctgggattacagctgaatgccaccttgctgggctaatttttgtatttttagtagagatggggtttcaccatgttggccaggctggcctcgaactcctgacctcgagtgatctgcccgcctcctgaagtgctgggattacaggcgtgagccacctcgtcctggtgagggtttttttttttccccaaccctctgtggtggatactgaaagaccatattaggataactgtacagtatagagaaggcagtggcaagttttctctgtcatataccagagtgggcttgggcatggtggcatactcctgtagtctcagctaatcaggaggctgaggaaggaggatcgcttgggcccaggagttggagactgtagtgagctgtgatcacaccaccacacttcaatctgggcaacagagcaagagaccctatctctaaaaaaaagtaagtatttcggacactgtgggccatacggtctctggtgcagtttctcaacatggctgttgggtgaacacaaccacgcacagaacgcaaaccaatacacgtggctgtgggcccagaaaatgttatttatggacacaaaaattggaatttcatataactgttttgtgtcatgaaaatgatttccctttttatttttatttttcttctcaagtatttaaatatgtaaaagccatttttaggcctggcaggatggttcacagctgtaatcccagcactttgggaggtcgaggcgggaggatcacgaggtcaggagatcgagaccatcctggccaacacagtgaaaccccgtctctactaaaaatacaaaaaattaaccaggcttggtggcgcgcgtctgtagtcccagctgctcaggaggctgaggcaggagaatcgcttgaatgcaggaggcggaggttgtagtgagccgaggttgcaccactgcactccagcctgagcgacagagtgagagtccgcctcaaacaaaaaaatgtttgcccatgctggtcttgaactcctgggctcaagctatctgcctgccttggtctcccaaagttctgggattacaggcatgagctacagcgcccggacttttgttgttttatatctatatatctatatataacttgttttatgtatatatataacttgttttatatatatacataaactgcagtaaaaaacatgtaacataaaatttaccttctcaaaccttattaagtgcacagttctgtgccattagcaaattcacactgttgtacaacatcacaaccaccatctccagaacttttttttttttttttattctttttgagacagagtctcactcgtcgcacgggctggagtgcagtggtgcgatctcggttcactgcaacctccacctaccaggttcaagcaattctcctgcctcagccccctcagtagctgggattacaggtgcccgtcctaccacgcccagctaatttttgtattttcagtagagactgactgggtttcaccatgttggccaggctggtctcgaactcctgacctcaagtgatcctcccacctcagcctcccaaagtgctgggaatacaggcatgagccactgcgcccggccccagaactcttttatcttcccaaactgaagctctgtccccatgaaacactcactctccatcccctccccaactcctggcacccaccattctactttctgtccctatgaatgtgatggctctagggacctcctctgagtggaatcagacagcattttccttttttgactggcttatttcactgagccaagtgcggtggcacacgcctgtaatcccaaaactttgggagaccgaggcgggcgcatcacctgaggtcaggagttcgagaccagcccggccaacatggtgaaaccccatctctagtaaaaatacaaaaaattagcctgtcatggtcgtgggtgcctgtaatcccagctaagtgggaggctgaggcaggagaatcgcttgtacccaggaggcggaggtcgcagtgagccgagatcgtgccattacactccagcctgggcaacaagagtgaaactccgtctctcctaaaaatacaaaaaaattagctgggcatggtggcacatgcctgtagtcccagctacttgggaggctgaggcaggagaatcacttgaacccgggaggtggaggttgtaatgagccaaggttggcggcgaagggatgggtaggggcccgagagtgaccagtctgcatcccctggccctgcgcagggaccaacgaatgcttggacaacaacggcggctgttcccacgtctgcaatgaccttaagatcggctacgagtgcctgtgccccgacggcttccagctggtggcccagcgaagatgcgaaggtgattcccgggtgggactgagccctgggccccctctgcgcttcctgacatggcaaccaaacccctcatgcctcagtttccccatctgttaagtgtgcttgaaagcagttaggagggtttcatgagattccacctgcatggaaaactatcattggctggccagagtttcttgcctctggggattagtaattaagaaatttcaggccgggtgcgtaatccctgtaatcccaacaccttgggacgccgaggcgggcagatcacctgaggtcgggagttccagaccagcctgaccaacatggagaaaccccgtctctactaaaaatacaaaattagccgggcttggtggtgcatgcctataatcccagctactcaggaggctgaggcaggagaatcacttgaacctgggaggtggaggttgtggtgagccaagatcgtgccattgcactccagcctgggcaacaagagtgaaactccatccaaaaaaaaaagaaaagaaaagaaaaaaaagaaaagaaatttcagctgacacagcttcacactcttggttgggttcccgtggtgaatgatgaggtcaggtgatgactggggatgacacctggctgtttccttgattacatctcccgagaggctgggctgtctcctggctgccttcgaaggtgtgggttttggcctgggccccatcgctccgtctctagccattggggaagagcctccccaccaagcctctttctctctcttccagatatcgatgagtgtcaggatcccgacacctgcagccagctctgcgtgaacctggagggtggctacaagtgccagtgtgaggaaggcttccagctggacccccacacgaaggcctgcaaggctgtgggtgagcacgggaaggcggcgggtgggggcggcctcaccccttgcaggcagcagtggtgggggagtttcatcctctgaactttgcacagactcatatcccctgaccgggaggctgtttgctcctgagggctctggcaggggagtctgccgccctgttaggacttgggcttgccagggggatgcctgcatatgtcctagtttttgggaatatccagttaacggaaccctcagccctactggtggaacaggaaccggctttcctttcagggacaacctggggagtgacttcaaggggttaaagaaaaaaaattagctgggcatggtgccacacacctgtggtcccagctactcagaaggctgaggcgggaggattgcttgagggcaggaggattggttgatcctcccacctcagcctccggagtagctgggacctcaggtgcatgccactatgcctggctaattttcttttttctttttttttttttttcgagacggagtctcgctctgttgcccaggctggagtgcagtggcaggatctcggctcactgcaagctccgcctcccgggttcacgccattctcctgcctcagcctccccagtagctgggactacaggagcccgccactgcaccaggccaatttttttgtatttttagtagagacggggtttcactgtgttagccaggatggtctcgatctcctgacttcgtgatccgcccacctcggccttccaaagtgctcggattacaggcgtgagccactgcgcccagccgctaattttcatatttttagtaaaaacagggtttcaccatgttggccaggctagtcttgaactcctgaacccaagtgatcctcctgccttggcctcccaaagtgctgggattacagacaccacacctggctattattattttttagagacagggtgctgctctatcttccagcctgtagtgcagtgcagcctccatcatagctcgctgcagccttgacctcctgggttcacgtgatcgtcccgcctaagcctctggaggagctgggagtactggcatgtgccaccatgcctggttaatttttttttttttttttttgagacagagtctcattctgtcacccaggctggagtgcggtggtgcgatcttggcttactgaaacctccacctcccaggttccagcaattctcctgcctcacccttctgagtagctgggattacaggttccggctaccaaacctggctagtttttgtatgtttagtagagacagggtttcaccatgttggtgaggctggtctcgattctcccgcctcagcctcccaaagtgctgggattacaggcttgagccaccgtgcctggcttttttttttttttttttttttgtggcaataaggtctcattgtcttgcccaggctagccttatgctcctagcctcaagtgatcctcctccctcagcctcccaaagtgctgggattacaggtgggcgccactgtgcctgttcccgttgggaggtcttttccaccctctttttctgggtgcctcctctggctcagccgcaccctgcaggatgacacaaggggatggggaggcactcttggttccatcgacgggtcccctctgaccccctgacctcgctccccggacccccaggctccatcgcctacctcttcttcaccaaccggcacgaggtcaggaagatgacgctggaccggagcgagtacaccagcctcatccccaacctgaggaacgtggtcgctctggacacggaggtggccagcaatagaatctactggtctgacctgtcccagagaatgatctgcaggtgagcgtcgcccctgcctgcagccttggcccgcaggtgagatgagggctcctggcgctgatgcccttctctcctcctgcctcagcacccagcttgacagagcccacggcgtctcttcctatgacaccgtcatcagcagagacatccaggcccccgacgggctggctgtggactggatccacagcaacatctactggaccgactctgtcctgggcactgtctctgttgcggataccaagggcgtgaagaggaaaacgttattcagggagaacggctccaagccaagggccatcgtggtggatcctgttcatgggtgcgtatccacgacgctgagggctgcagagggaatggagggagcaggaaggagcttcaggaactggttagtgggctgggcatggtggctcaaagcacctgtaatcccagcactttgggaggccaaggtgggtggatcatcaagaccagcctgaccaacatggtgaaacctcgtctctactaaaaatacaaaaattagccgggtgtggtggtgggcacctgtaatcccagctgctcgggaggctgaggcaggagaatcacttgaacctgggagatggaggttgcagtgagccaagacagccccactgcactccagcctgggtgacagagtgagactccgtctcaaaaaaaaaaaaaaaaactaaacaaaaaactggttagtggctagacaacaggatggtatcttccaagcccatggctgactcagcagctcctgggtcaagacactgtgacctgtgtcccctggcaggaagcatcgcccctgccacctgcccggtgtactctgtacctgtcaggtgacatctgctacctaagcacgtgagaggtggcatttcacagtttcagtgtggtgctgacaacccgggacgcacactgtccttgcagctacaatcaggaggtgaatgttgggtttccagcagagaacactggagaaggcacacttggtgtctggaagggaaaagcagggaagagagcatcatcagatgcctgcgggtgaaggtgggcccgctatggccagcgtccctttttatttttatttatttatttatttgagatggaatctcgctctgtcgcccagactgtagtgcagtggtgcgatcacggctcactgcaagctccgcctcacaggttcacgccattctcctgcctcagcctcccgagtagctgggactacaggcacccgccaccacgcccggttaattttttgcatttttattagagacggggtttcaccgcgttagccaggatggtctaaatctcctgaccctgtgatccacccgcctcggcctccctaagtgcttggattacaagcgtgagccaccacgcccggccccctttttattttttattttttgagacggagtctcgctctgtcgcccaggctagattgcagtggcgtgatctcggctcactgcagcctccgcctcccaggttcaagtgattctcctgcctcaacctcccaactaattaggattacaagcatgtaccaccatgcctgactaattttttgtatttttagtagagactgggtttcaccatgttggctaggctggtctcgaacccttagcctcaagtaatctgcctgcctcagcctcccaaacagcggggattacaggcatgagccactgtgcccaacccaaccctggatctcttttaaacaagacaatgctcgctgttgccacagaacaatgggtggggtacatgtggcccagtgtgtttggccacataactgccaggccagagggaaagagactctcagactgtctccactcagatacaaatgtgtgtgttgtgtgcgtgtgttctggtctcatatttgtttgttttgagacagggtgtcgctctgtcactgagtctggagtgcagtggcgcaatcagagttcactgcagcctcaaactcttgggctcagttgattctcccacttcagcctcccaagtagctggaactacaggtgaacaccactgtgcccagctaatttattttatttttagtagagatgaggtctcactatgttgcccaggctggtcttgacctcctagcctcaagcaatcctcctgccttggtctcccaaagtgctgggattacacgtgcgagccattgcgcatggcttgtgttcttgtgtttcttcctttttctttcgagatggcgtctcagtctgccacccaggctggagtgcagtggtgtgatcatagctcactgtagcctcaacttcctgggctcaagcaatcctcttgatttcagcctcccgggcctggccagcatggtgaaaccccgtctctactaaaaatacaaaaatgtagccaggcgtggtggtgggcgcctgtaatcccagctacaccagaggctgaggcaggagaatcgcttgagcctggaaggtggaggttgcagcaagccaagatcgtgccactgcactccagcctgggcaacagagacagactctgtctcaaaaaaaaaaaaaaaaaacccaaacaagccacatttggagtttggggttcccagcaggactatttcccaagcctgagcctggctgtttcttccagaattcgttgcacgcattggctgggatcctcccccgccctccagcctcacagctattctctgtcctcccaccagcttcatgtactggactgactggggaactcccgccaagatcaagaaagggggcctgaatggtgtggacatctactcgctggtgactgaaaacattcagtggcccaatggcatcaccctaggtatgttcgcaggacagccgtcccagccagggccgggcacaggctggaggacagacgggggttgccaggtggctctgggacaagcccaagctgctccctgaaggtttccctctttcttttctttgttttttctttttttgagatgaggtcttggtctgtcacccaggctggagtgcactggcgcaatcgtagctcactgcagcctccacctcccaggctcaagtgatcctcctgcctcaccctcctgagtagctgagattacagacacgtgccaccacggcagactaattttattttatttttgggaagagacaaagtcttgttatgttggcctggctggtctcaaactcagggtgcaagcgatcctcccgcctcagccttccaaactgctgggattacaggcgtgggccaccgtacccagcctccttgaagtttttctgacctgcaactcccctacctgcccattggagagggcgtcacaggggaggggttcaggctcacatgtggttggagctgcctctccaggtgcttttctgctaggtccctggcagggggtcttcctgcccggagcagcgtggccaggccctcaggaccctctgggactggcatcagcacgtgacctctccttatccacttgtgtgtctagatctcctcagtggccgcctctactgggttgactccaaacttcactccatctcaagcatcgatgtcaacgggggcaaccggaagaccatcttggaggatgaaaagaggctggcccaccccttctccttggccgtctttgaggtgtggcttacgtacgagatgcaagcacttaggtggcggatagacacagactatagatcactcaagccaagatgaacgcagaaaactggttgtgactaggaggaggtcttagacctgagttatttctattttcttctttctttttttttttttttttgagacagagttttgctctcgtttcccaggctggagggcaatggcatgatctcggctcaccgcaacctccacctcccaggttcaagtgattctcctgtctcaggctccccagtagctgggattacaggcatgcaccaccaccatgcccggctaattttgtatttttagtagagacggagtttctccatgttggtcaggctggtctcgaactcccgacctcaggtgatctgcctgcctcggcctcccaaagtgctgggattacagacttgagccaccgcgcccagctatttctgttttctttctttcttcttcttctttttttttttctaagagacaggatctcactctgtccccaggcaggagtgcagtgctgtgatcatagctcactgcagccttaacctcctgggctcaagtgatcttcccacctcagcctcccaagtagctggaactacaggtgcacaccaccatgcccagctcatttttgtattttttttttttttgagacagtctcgttctgtcaccccggctggagtgcagtggtacaatcttggctcactgcaacctctgcctcccaggttcaagcgattctcctgcctcagcctcctgagtagttgagattacaggcatgtgtgccatcatacctggctgatttttgtatttttttttagagatggggtctcagtatgttgaccaggcttgtcttaaactcccggcctcaagtgatcctcccacttcagtctcccaaagtgctgggattacaggcatgagccactgcggccggtttgttttcttttttttttcgttttttggagacggaatttcacctttgttgcccaggatggagtgcaatggcacgatatcgcctcaccacaacctctgcctcctgggttcaaaccattttcctgcctcagccttcttagtagctgggattacaagcatgtgccaccacgcccggctgattttgtatttttagtagagatggggtttctccatgttggccaggctggtctcgaactcctgacctcaggtcattcgcccacctctgcctcccaaagtgctgggattacaggcgtgagccaccgtgcccggtggtttgtattctttttactgagagtcgtgaaaggcagtgatcctctgtcacatgtgatcttggctctcaggggacatttggcaatttctagagattttttggttgtcacaagtcaatggggaagactgttggcatttagtgggtagaggctggtgacgctgctgaacacccagaacagggaagtagcaggccctagatagagccatcgtggggaaaccctgctctaaggaaatggcgctattttataaccccacgttcctggcatgattaccaacagccaaaagtggagtccccccaagtgtgttcgtccatttgcattgcagtaaaggaatagctgaggccgggtaatttataaagaaaagagatttaaactgggtatggcagtttatgcctataatcccagaactttgggaggctgaggcaggaggatcgcttgagtccaggagtgtgagaccgagaccagcctggccaacatgacgaaactctgtctctacaaaaaatacaaaaagtaggccaggcacggtggttcacgcctgtaatcccagcactttgggaggccgaggcgggcggatcacgaggtcaggagatcgagaccatcctggctaacacggtgaaaccccgtctctactaaaaatacaaaaacaaaattagccgggtgtggtggcaggcgcctgtagtcccagctactcgggaggctgaggcgggagaatggcgtgaacccgggaggcggagcttgcagtgagccaagatcgcgccactgcactccagcctgggtgaccgagttgagactccgtctcaaaaaaaaaaaaaaaaaaaaaaatacaaaaagtagccaggtgtggtggcaggcacctgtaatcctgggttctcgagaccgaggcatgagaattgcctgaccccaggaggtggaggctgcagtgagccaagatcatgccactgcactccagcctgggcgacagagtgggactctgtctcaaaaaacaacaaaaaaaaagttctggaaatggatggtggtgatggtgatacttccacaacagcgtgaatctgcttaaggccaccgaactgtgcactcacaaatagtcgagatggtacattttatgttatgtgtatttcaccacaattaaaaactagttgtgggccaggtgtggtggttcatgcctgtaatcccagcactttgggaggtcagagggaggtggatcatgaggtcagcagttcgagaccagccaggccaacatggtgaaaccccatctctactaaaaatacaaaaattagccaggcgtggtggcacatgcctgtagtcccagctacttgagaggctgaagcaggagaatcgcttgaacctgggaggctaagattgcagtgagccgagatcgtgccactgcactccagcctggacgacagagtgagacttcgtctcaaaaaaaaaaccaaaaaaaaaattagctgtgggtcaggcactgtggctcacgcctgtaatcccagcactttgggagaccgaggtaggtggatggcctgaggtcaggagttcgaatccagcctggccaacatggtgaaagcccgtctctactaaaaatacaaaaaattagtcaggtatgttggcacacctgtaatcccagctactcgggaggctgaagcaagagaatcgtttgaacccaggaggtggacgttgcagtgagccgagattgggccactgtactccagcctgggcaacaaaagtgaaactctgtctgaaacaaacaaacaaacaaacaaacagacaaacaaaaaaactagttgtggagagagggtggcctgtgtctcatcccagtgtttaacgggatttgtcatcttccttgctgcctgtttaggacaaagtattttggacagatatcatcaacgaagccattttcagtgccaaccgcctcacaggttccgatgtcaacttgttggctgaaaacctactgtccccagaggatatggttctcttccacaacctcacccagccaagaggtaagggtgggtcagccccacccccccaaccttgaaacctccttgtggaaactctggaatgttctggaaatttctggaatcttctggtatagctgatgatctcgttcctgccctgactccgcttcttctgccccaggagtgaactggtgtgagaggaccaccctgagcaatggcggctgccagtatctgtgcctccctgccccgcagatcaacccccactcgcccaagtttacctgcgcctgcccggacggcatgctgctggccagggacatgaggagctgcctcacaggtgtggcacacgccttgtttctgcgtcctgtgtcctccaactgccccctcctgagcctctctctgctcatctgtcaaatgggtacctcaaggtcgttgtaaggactcatgagtcgggataaccatacttttcttggatggacacatcagcaccgggcttgacatttacccagttcccctttgatgcctggtttcctctttcccggccccctgaagaggtgatctgatttctgacaggagccctgagggaggaaatggtcccctttgttgacttttctttttctttatttttttcttttgagatttgctgtcacccagcctggaatgcagtggtgccatcttggctcactgctacctctcccactgggttcaagcaattctcctgcctcagcctcccaagtagctgggattacaagcatgcgccaccatgcctggctaagttttgtatttttagtacagacagggtttctccatggtggccaggctggtcttgaactcctgacctcaggtgatcctcccacctctgcctcccgaagtgctacgattacaggcatgagccaccgcgcccatccccctttgttgacttttctcatcctctgagaaagtctcagttgaggccagcacctccctcaagtgaattgaatctcccttttgaacaacaacaaataacaatatgacccagacgtggtggctcacacctgtggtcccagctactcgggaggctgaggtgtgaggattgcttgagcccaggaggtcaaggctacagagagctataatcacaccacttcactccagcctgggggacaaagtgaaaccctgtctgaaaaaaacaaaaaaagaaaaaggaaaaagaaacaatacgatcacaaagtagatattcatagtgtttattttcagtactcttttttttttttttttttttttttgagacggagtcttgctctgttgcccaggctggagtgcagtggcacgatcttggctcactgcagcctctgcctcccaggttcaagcgcttggctcactgcaacctccgcctcctgggttcaagcgcttcttctgcctcagcctccccagtagctgggactataggcacgtcccactacgcccagctaattttttgtattttttagtagagatggggtttcactatgttagccaggatggtctcgatctcctgacctcgtgatctgcctgccttgggctcccaaagtgttgggattatgggcatgagccactgcacctggccttttttttttttttttttgagatggagtttcgctcttgttgcccaggctggagtgcaatggtgtgatctcggctcactgcaacctctgcctcctgggttcaagcaattctcctgcctcagcctcccgagtagctgggattacaggcacctgccaccacgcctggctaatttttgtacttttagtagagacggggtttctccatgttggtcaggctggtctcaaactcctgacctcaggtgatccacccacctcggcctcccaaagttctgggattacagacatgagccaccgcgcctggccgtgtctggccttttttagttatttcttttttttttttttttttttttgagacagagtcttactccgtcgcccaggctggagtgcagcggtgcgatgtctgcgcactgcaagctccgccccctgggttcatgccattctcctgcctcagccttctgagtagctgggactgcaggcgcctgccactacgcccggctacttttttgtatatttagtagagatggagtttcactgtgttagccaggatggtctcgatctcctgactttgtgatccgcccgcctcggcctcccaaagtgctgggattacaggcgtgagccaccatgccaggcttttttttttttttttttttttgagacggagtcttgctctgtcgcccaggctggagtgcagtgccatgatctcagctcactgcaagctccacttcccaggctcacgccattctccagcctcagcctcccaagtagctgagactacaggggcccgccaccacactcggctaatttttttgtatttttagtagagacggggtttcaccatgttagccaggctggtcttgaactcctaacctcaggcgattcacctgcctcggcctcccaaagtgctgggattaaaggtatgagccacctcgcctggtgtgagccacctcgcccagcctgagccacctcacccagcctaagccactgtgcctggcctgattttggactttttaaaaattttattaataattatttttgggtttcttttttttgagacagggtcttactctgtcatccaggccatcctgtctgtctgtcatcccagtgatgggatcataccttgctgcagcctctacctcctgggctcaagcgatcctcccccctcagcctcctgagtagctgggagtacaggtgtgcaccaccacacctggctaatttttttttttttttttgtatatagagatggtattttgccatgttgaccaggctagtcttaaactcctggactcactcaagagatcctcctgccttggcctcccaaggtcatttgagactttcgtcattaggcgcacacctatgagaagggcctgcaggcacgtggcactcagaagacgtttatttattctttcagaggctgaggctgcagtggccacccaggagacatccaccgtcaggctaaaggtcagctccacagccgtaaggacacagcacacaaccacccgacctgttcccgacacctcccggctgcctggggccacccctgggctcaccacggtggagatagtgacaatgtctcaccaaggtaaagactgggccctccctaggcccctcttcacccagagacgggtcccttcagtggccacgaacattttggtcacgagatggagtccaggtgtcgtcctcactcccttgctgaccttctctcacttgggccgtgtgtctctgggccctcagtttccctatctgtaaagtgggtctaataacagttcttgccctctttgcaaggattaaatgggccaaatcatatgaggggccaggtccttcaggctcctggttcccaaagtcagccacgcaccgtgtgggtcccaaaattttatcaaggcacattcgttgcctcagcttcaggcatctgcccaaaaaggccaggactaaggcaaggagagggagggattcctcagtactcagcttttcacagaggctccaaaaggctaaggaatccagtaacgttttaacacaattttacaatttttttttttgagacggagttttgctcttgttgcccaggctggagtgcagtggcacgatctcggctcactgcaacctctggctcccgggttcaagcgattctcctgcctcagtctcccgagtagctgggattacaggcatgcgccaccacgctcggctaattttgtatttttagtacagaaggggcttctctgttggtcaggctggtcgtgaactctcaacctcaggtgagccacccgcctgagcctcccaaagtgctgggattacaggtgtgagccaccacgcctggccttttttttgagacagagtctcgctctcgcccatgctgtactgcagtgacgcagtctgggctcactgtaacctccgcttcccaggttcaagtgattcttctgccgcagcctcccatgtagagtagctgggattacaggcacccgccaccatgcctggctaattcttgcatttttagtagagatggggtttcacagtgttggccaggctggtctcaaacttctgacctcaagtcatctgcctgccttggccctgccaaagtgctgggattatagatgtgagccaccgcgcctggcctacagtttattctttggtggctcacacctgtaatctcagcactttgggaggccaaggtgggagaatggcttgagcccaggagttcaagtccagcctgggcaacatagcaagaccctatctctactacaaaataaataataaataaactaattttttttcttttaaaacccaactattcaacatggcaatgcaatatattaaaaaaattttttttttctttgaaacggagtctctcactgtcacccgggctggagtgcagtgtcgccatcttggctcactgcaacctccgcctcccaggtccaagtgattctcctgcttcagcctcccgagtagctgggattacaggcacccaccaccatacccagctaatatttttgtatttttagtagagatggggtttcactatgttgggcaggctggtctggaactcctgacctcgtgatctgcccgaggatcggcggcctcccaaagtgctggggattgcaggcatgagccaccgtgcccagccaaaacttttttatttttatttttttgggacacggtctcactgtgtaccccagactggagtgatagagtgctgtcatggctcactgcagcctcaacctccctgggctcaggtgatcttcctgcttcagtctcccaggtagctgggactacaggcatgagccaccacacccagctaatttttgaatttttttgtagagacagggtttcaccttgtggcccagacttgtctctaactccagggctcaagcgatctgcccaccttggcctcccaaagtgctgagattaatgcaatttaaaaaattttttggccaggcctggtggctcatgcctgtattcacaacaccttgggaggcaaaggtgggcagatcacttgaggtcaggagttcgagactagcctggccaacatggtgaaaccccctgtctactaaaaaaatacaaaaattacctgggcacagtggtgggtgcctgtaatcccagctacttgggatgctgagggtggagaattgcttgaacctgggaggcagaagttgcagtaagccaagatcatgccactggactccagcctcagtgacagagcaaaactctgtctccaaaaaaattgttttttttttttttttttcaaatcatcacactacagccaaggcctggccacttacttttgtaaataaagttttattggagccagtggaccagtgaggccgaatcttgcaggtgtaagatcacagtctatccttgaaaattttgatattttgttcattgggtggtttttcattaatttaaattttaaaaaataacatattaaaggctggtgtggaggtgcacgcctgcagtcctagctactcccagaggctgaggcgggagacttgcttgagcccaagagttgaagtccagcctgggcaacatagcgagacccccatctctaaaaataaaaataatgcattagaatattattggattcctgggcagggcacagtggctcacacctgtaatcccagcactttgggaggctgaggtgggtggatcacctgaggtcaggagtttgagaccagcctggccaacatggtgaaaccccgtctctactaaaaatacaaaaattagccaggcgtggtggcaggtgcctgtaatcccagctactcgggaggctgaagcacgagaatcgcttgaatccaggaggcggaggttgcagtgagctgagattgcgccattgcactccagcctggaggacaagagtgaaactccattcccctctgcaaagaaaaggaatattatcagattcctaagctttttggctccccctttagtttgggggctggggtggtgagtgtctgacctggcctcactgtcctccctggatgtgatgagacccaggtgtgggtcaggatgtcattcgtttgtccaccagagggcgcccaaactgctttgagctgctgggaaatggtgctcctagacttttagcaaacaaacaaaaaaaaatggcacatcggcaaatttcagaccattctttttttttttttttttggttccagagtagctgaaatctttgttcagttacaagcaggataaaatggaaactgcctgggagaggctgagaaaccttcttgcttgggggaggtggggcactgctagaattaatcgcttcacagaccagcccatccaggactcctcaaatttggcaaaaaagccattcattcattcattcatttatgtagagacgagggggatctggctatattgcctagattggtctcaaattcctggcctcaagtgatcctcctgccttggtctactaatgtgctgcgattacaggcatgagccaccgtgcctagctctagtggacttgaaatgttgccttgcccagggcccttatgttgaatggcccaggtccacttgtatggttctgtaccaaggttaaccccatcccataatgcctgggacagttgatgcaggacaatcagcttctgtgccattcaacctcaggactgagcatgctgggcattgtggggtccgaaggtggctcccctgtccccttcaaaataccctctttttcttttcttcttttttttttttttttttttttgagacgaagtcttgctctgttgccccagctagagtgcagtggtgcgatctcagctccccgcaacctctgcttcccgggttcaggcgattctcctgcctcagcctcctgagtagctgggattacaggtgcccaccgccacagctggctaatttttgtatttttagtagagacagggtttcaccgtgttggccaggctggtcttgaactcctgacctcaggcaacctgcccacctcagcctcccaaagtgctgggattacaggtttgagccactgggcctggccttttttttttttttttgagagggagtctcactctgttgcccaggctggagtgcaatggcgcgatcttgactcactgcaactccatttcccgggttcaagtgattctcctccctcagcctcccaagtagctgggattacaggtgcatgccaccacggccagctaattttgtatttttagtagagacagggtttcactatgttgatcatgctggtctcaaactcctgaccttaggtgatctgcccgccttagcctcccaaagtgttgggattacaggtgtgagccaccgcgcccagaccaaaatatgctcattttaataaaatgcacaagtaggttgacaagaatttcacctgcaaccttgtcaaccacctagaataaaagcctctgcagccctcccctaaagactcatcaatgtgaggctcaagaaccttcttaggctgggctcggtggctcatttctgtaatccctgcactttggaaggctgaggcaggaggatctcttgaggccaggagttcaagacaagcctgggcaacatagccagacctctgtttctatcccccacaaaaagaaccttcttaaaccggaattgagtcctacaacctcgataactcacaaataagcccgtgtggcctctcacagacttgggaagttctccaagtgtccagggagatgtgccaggcgctttcctgccgtgaccaccgtcctctgcctgctccatttcttggtggccttcctttagacctgggcctcactcttgcttctctcctgcagctctgggcgacgttgctggcagaggaaatgagaagaagcccagtagcgtgagggctctgtccattgtcctccccatcggtaagcgcgggccggtcccccagcgtcccccaggtcacagcctcccgctatgtgacctcgtgcctggctggttgggcctgttcactttttctcctggacagggaacagccccactggtgtcctttatcacccccacggcctctcctggcttggggctgacagtgacaagatcagacagctaaggggtcagatggaggatgtggagctgggtcccgtgctgtggaatagcctcaccgagatttgagtgccttctggggaactggttcccttgcagggggctgtgtggagaggcgcgctctccctgcctcacccatgctcatcctaactcggttaccatcacatctcttttttctttttttcttaaattttaagaaaaaagaaatttaatttttttgagagacagagtcttgctctgtcacccaggctggagtgcagtggcaccatcatgcctcgctgcagcctcaatgtctgggctcaagcgatcctcccacctcagcctcctgagtagctggtgcaagccactataccccacttcctatttcttaaaaagtcacagccctgtgtgtggctaatcctggacagaaatctagaagaagtcagctacttctggggcgtggctcacccagtgggcttcaggttagatatttcttatacttatgaggctgggtgtggtggcttatgcctgtaatcccagcactttgggaggctgaagtgggtggattgcttgggctcaggagttcgagaccaacctgggcaacatggcgaaaccctgtttctagaaaaggtacaaaaattagctgggcaggtggcacgtgcctgtggtaccagctacttgagggcctgaggcaggaggatcgcttgaacctgggaggtcgaggttgcagtgaactgagatcatgtcactgcactccagcctggtgacagagcaagaccccgtctcaaaaaaaaaaaaagaaagaaaaaaattcttatgcatagatttgcctcttttctgtttgtttgttttgagatggagtctcgctctgtcgcccaggctggagtacagtggctcaacctcggctcactgcaacctctgcctcccgggttcaagcaattctcctgcctcagcctcctgagtagctgggactacaggcgcccgccaccatgcccagctaatttttgtatttttagtagagactgactgggtttcatcatgttggccaggctggtctcgaactcttgacctcatgatccgcccgcctcagcctcccaaaatgctgggattacaggcgtgagccaccaggcccaggccgcaaggcgatctctaaacaaacataaaagaccaggagtcaaggttatggtacgatgcccgtgttttcactccagccacggagctgggtctctggtctcgggggcagctgtgtgacagagcgtgcctctccctacagtgctcctcgtcttcctttgcctgggggtcttccttctatggaagaactggcggcttaagaacatcaacagcatcaactttgacaaccccgtctatcagaagaccacagaggatgaggtccacatttgccacaaccaggacggctacagctacccctcggtgagtgaccctctctagaaagccagagcccatggcggccccctcccagctggaggcatatgatcctcaagggaccaggccgaggcttccccagccctccagatcgaggacagcattaggtgaatgcttctgtgcgctcattcagaatgtcagcggacaatggccttggtggtgtagaggaatgttggataagcaaatagagagctccatcagatggtgacagggcaaagaaagtcaaaaggagttcagaggccgggcgcggtggctcatgcctgtaatcccaggactttgggaggccgaggctggcggatcacctgaagtcaggagtttgagaccagcttggccatcatgacaaaaccccgtctctattaaaaatacaaaaaattagccaggcgtgggagtgggcgcctgtaatcccagctactcgggaggccgaggtagaaaaatcgcttgaacctaggaggcagaggttgcagtgagccgagatcgcgccactgcattccagcccgggaggcaagagcaaaactccatctcaaaaaaaaaaaaaaaaggagttcagaggcccggcatggtggttcacacatgtgatcccagaacttggggaggttgaggcaggagaatcacctgagctcagagttcaagaccagcctgggcagcacagcaagaccccatctctgcaaaaaataaaaatttagcccagtgtggtgatgagcgcctagttccagctactagggaggctaaggcaggaggattgcttgaggctaaggtaggagattgagactgcagtgacttgtgattgcgtcactgcgctccagcctgggtgacagagcaagcccttgtctcttaaaaaaaaaaaaaaattcaaagaagggtttccagagggccaggagggaggaagggagaggaggtgttttatttttttgcttttattttttattttgagacagagtctctctctgtcacccaggttggagtgcagtgctgtgatcttggctcactgcaacttctgcctcctgggttcaagcaattcttatgcctcagcctcagcctcctgagtagctgggattacaacactatgcccgggtaatttttgtatttttagtagagacgaggtttcgccatgttgcccagactggtctcgaactcctgacctcaagtgatccacccgccttggcctccccacgtgctgggattgcaggcgtgagccactgcgcccgccttgatctttacacaaggggtttagggtaggtagccttctctgaaccaggagaacagcctgtgcgaaggccctgaggctggaccgtgcctgttgggtttgaggccgttgtagctggagcaaacagagagaggggtaaaaaggcaggaggctaccaggcaggttgtgcagagccttgtgggccactggggaggactttggcttttgccctgagagcggtgggaagtgactgaatccggtactcaccgtctccctctggcggctcctgggggaacatgcttggggatcaggctgggggaggctgccaggcccaggaggtgagaagtaggtggcctccagccgtgtttcctgaatgctggactgatagtttccgctgtttaccatttgttggcagagacagatggtcagtctggaggatgacgtggcgtgaacatctgcctggagtcccgtccctgcccagaacccttcctgagacctcgccggccttgttttattcaaagacagagaagaccaaagcattgcctgccagagctttgttttatatatttattcatctgggaggcagaacaggcttcggacagtgcccatgcaatggcttgggttgggattttggtttcttcctttcctcgtgaaggataagagaaacaggcccggggggaccaggatgacacctccatttctctccaggaagttttgagtttctctccaccgtgacacaatcctcaaacatggaagatgaaaggggaggggatgtcaggcccagagaagcaagtggctttcaacacacaacagcagatggcaccaacgggaccccctggccctgcctcatccaccaatctctaagccaaacccctaaactcaggagtcaacgtgtttacctcttctatgcaagccttgctagacagccaggttagcctttgccctgtcacccccgaatcatgacccacccagtgtctttcgaggtgggtttgtaccttccttaagccaggaaagggattcatggcgtcggaaatgatctggctgaatccgtggtggcaccgagaccaaactcattcaccaaatgatgccacttcccagaggcagagcctgagtcactggtcacccttaatatttattaagtgcctgagacacccggttaccttggccgtgaggacacgtggcctgcacccaggtgtggctgtcaggacaccagcctggtgcccatcctcccgacccctacccacttccattcccgtggtctccttgcactttctcagttcagagttgtacactgtgtacatttggcatttgtgttattattttgcactgttttctgtcgtgtgtgttgggatgggatcccaggccagggaaagcccgtgtcaatgaatgccggggacagagaggggcaggttgaccgggacttcaaagccgtgatcgtgaatatcgagaactgccattgtcgtctttatgtccgcccacctagtgcttccacttctatgcaaatgcctccaagccattcacttccccaatcttgtcgttgatgggtatgtgtttaaaacatgcacggtgaggccgggcgcagtggctcacgcctgtaatcccagcactttgggaggccgaggcgggtggatcatgaggtcaggagatcgagaccatcctggctaacacgtgaaaccccgtctctactaaaaatacaaaaaattagccgggcgtggtggcgggcacctgtagtcccagctactcgggaggctgaggcaggagaatggtgtgaacccgggaagcggagcttgcagtgagccgagattgcgccactgcagtccgcagtctggcctgggcgacagagcgagactccgtctcaaaaaaaaaaaacaaaaaaaaaccatgcatggtgcatcagcagcccatggcctctggccaggcatggcgaggctgaggtgggaggatggtttgagctcaggcatttgaggctgtcgtgagctatgattatgccactgctttccagcctgggcaacatagtaagaccccatctcttaaaaaatgaatttggccagacacaggtgcctcacgcctgtaatcccagcactttgggaggctgagctggatcacttgagttcaggagttggagaccaggcctgagcaacaaagcgagatcccatctctacaaaaaccaaaaagttaaaaatcagctgggtacggtggcacgtgcctgtgatcccagctacttgggaggctgaggcaggaggatcgcctgagcccaggaggtggaggttgcagtgagccatgatcgagccactgcactccagcctgggcaacagatgaagaccctatttcagaaatacaactataaaaaaataaataaatcctccagtctggatcgtttgacgggacttcaggttctttctgaaatcgccgtgttactgttgcactgatgtccggagagacagtgacagcctccgtcagactcccgcgtgaagatgtcacaagggattggcaattgtccccagggacaaaacactgtgtcccccccagtgcagggaaccgtgataagcctttctggtttcggagcacgtaaatgcgtccctgtacagatagtggggattttttgttatgtttgcactttgtatattggttgaaactgttatcacttatatatatatatatacacacatatatataaaatctatttatttttgcaaaccctggttgctgtatttgttcagtgactattctcggggccctgtgtagggggttattgcctctgaaatgcctcttctttatgtacaaagattatttgcacgaactggactgtgtgcaacgctttttgggagaatgatgtccccgttgtatgtatgagtggcttctgggagatgggtgtcactttttaaaccactgtatagaaggtttttgtagcctgaatgtcttactgtgatcaattaaatttcttaaatgaaccaatttgtctaaactcgatgcacgttcttctgttcgcgcgcttctttttgtttttttttttttcctgagatggagcctggctctgtcacccctggctggagtgcagtggcatgatctcggcttactgcaagctccgcctcccaggttcaagcaattctcctgcctcagcctccctagtagctaggattacaggtgagtgccaccacgcctggccaattttttttttttttttttttttgagacagagtctcgctctgtcacccaggctggagtgcagtggtgtgatctcggctcactgcaagctctgcctcccaggttaatgccattctcctgtctcagcctcctgagtagctggggccacaggcgcctgccaccacgcccggctaatttttttttgtacttcttttagtacagacggggtttcaccatgttagccaggatggtctcgatctcctgaccttgtgatccacctgcttcggcctcccaaagtgctgagattacaggcgtgagccaccgcgggtggccaacgctaatttttttgtttttttagatggagtcttgctctgtcgcccaggctggagtgcagtggcgtgatctctgcctactgcaagctccgcctcccgggttcatgccattctcctgcctcagcctcctgagtaactgggactacaggcacccgccaccacgcccggctaattttttgtatttttagtagagacagggtttcaccgtgttagccaggatggtcttgatctcctgaccttgtgatccacccgtctcggcctcccaaagtgctgggattagaggtgtgagccaccacacctggcctagcctggctaatttttgtatttttggtagagacggggtttcaccatgttggtcaggctggtcttgaacttctgacctcaggtaatctgcctgcctcagtctcccaaagtgctgggattacaggtgtgagccaccgcgcctggcctcacttccttctgtcatctgtttgtggattggactccccaggagaaggacccagaaggggaagactcccagaactccgggcaagatgcaatctccgtgggctgccacagtgcctggcaggtgctgtgatggctgagctggtgattgtgttctctgctgtcgcttctctgagttggagattttgtcaagtcccctgctcatccattcatacactcgacaaatatctgttgagtgctaagtgcgaaccatgctctgccgtaggcttgtgggacactacaggggatataagaaatgaaagccgggtgtggtggctcacacctgtaatcctagcagtttgggaggccgaggcgggcagatcatgaggtcaggagatcgagaccatcctagctaacacagtgaaaccccatctctactaaaaatacaaaaaattagccaggcgtggtggtgggcgcctgtagtcccagctgcttgggaggctgaggcaggagaatagcgtgaacctgggagttggagcttgcagtgagccgagatcgcaccactgcactctagcctgggcaacagagcaagactccatctacaaaaaaaaaaaaaagaaatgaagtcttgatacggtggctcatgcctgtaatcccagcactttgggaggccaaggcaggcggatcacgagctcaggagatcgagaccatcctggccaacgtggcgaaacccagtctctactaaagatacaaaaaattagccaggcatggtggcgggcgcctgtagtcccagctacttgggaggctgaggcaggagaatggcatgaacccaggaggcagagcttgcagtgagctgagatcgcgccactgcactccagcctgggcgacagagcgagactctgtctcaaaaaaaaaacaaaaaagaaatgaaaatctccctgtctgtccttaaggacctgacatcattttattttatttatttttttgagacaaggtcttgctttattgcccaggctggagtgcagtggcacaatcttggctcactgcaacctccacctcccgggttcaagcgattctcctgcctcagcctcctgtgttgctgggatcacaggcgcgtacccggctaatttttatattttcagtagagatggggttttgccatgttggccaggctattcttgaactcttgacctcaagtcgtctaccgcctcggcctcccaaaatgctaggattacaggtgtgagccaccgcaccaagccaaatgttacttcattagagaaactccccctgaagaaaacttccttcctgccagttgcttttctgtccccatactctgtttaatattcttctagaatattcttctaaaatgtagcaattttttgtatctattctaaaaatggaggccaaggaaggcagatcacttgaggtcaggagtttgagactagcctggccaacatggtgaaaccatgtctctactaaaaagggtaagattttgaggctgcagtgagctatgacggcaccattgcactccaggctgggcaacagagcgagacaccatctcaataaaaaaaaaaaaaagcagggtgcggtggctcaagcctgtaatcccaacactttgggaggctgaggcaggcggatcatgaggtcaggagttcgagaccagcctgcccaacatagtgaaaccctgtctactaaaaatacaaaaaaattagccgggtatgctggcaggtgactgcaccataaaaaatgttcaagattaaacagggggacggtgaggtaacccagaaataagcaacagcagaaagcgccaccaccacaaaaccaggagaggaagatgtggtttctggagcctgggagctggtgagagccagaaactcataggagggaaagaagtgctgcagacatggtccccagcagagcgaggcggggaagagcccagcctgtcccccgctccaggctctatctcccaccagtgcctcccacgggctgagcccaacagggacaggctgatgaagcccaggcaatggtgccttactgggtggatcgaaggagggacagggttggcccaggggtgacacgacactggggtggttaggtccacaaacgtggctcatgcctgtaatcccagtaccttgggaagctgaggcaggaggattgcttgagcccaggagttcaagagcagtctgggcaacatagcaagaccccatctctaaaaaacgtttttaaatttctgggc

SEQ ID NO: 69 - DNA, 129000 bp, Homo sapiens
aagatgacatttattatagtatgtatagtacgtagttggcgtttttttcccccctgaggcaaggtctttctctgtcacccaggctggagtgtagtggcatgctcatggctcacagcaaccttgccttcctgggctcaagtgatcctcctacctcagcctcctgagtagctgggactacaggcgcatataaccacgcttggctaattttttattttttgtagagatggggggtctcactatagttcccaggttggtcttgaactcctgggctcaagtgatcctcctgcctcagcctcccaaagtgctgggattacaggtgtgagccactgtgcccagcctgtagtttttacatcctaatgatcaagaccctttaggtctcaccagactatcatgaggtcctttattacctctcctgattagtaaaagtcaggcttactcattcatagacttaaacccttggttgccacagcttctgtaaagcttggacactgaaacaagatagacgtaatcagtctcagagaatagctaactcagtgaagtgggcttaggggtttacagtgtttgagaatggctggcattatttcttaggctactgcctggaggtggtaaatgctgaattataattttaatggagagatgaggatgtagtttgatctaggatgttgtttgcaatcacatgaacaaagaccaagcaagcaatggaaaaatgaagacaactgagaggtaggctagggcgagtaaaggagcaggataaagagaaaaaaaaagcaaataaagttcagagctgcagttgtattttaaaggctgtctgcagagcaagagaaagccattggaatgacatgataatcagaatcctacgtccaggcaacaaaacactacccatcctgccacctataaacccagatagttgctctgatctaacaattcagtccatcacagcttagtacagactgcaaactccacctccatccagcctttcctaaccttcctaacttcccatcttctctgatctccaaataacgcagacctccttctgtctctctacagactccctaatatgcaaatacccatccccatttattaacccccatatccctctccttagccctttaattggatttcagtactttccaagtctacttcatcccataccctctgacctactgaaatacttttactccttaatcttctcctcctttcaaatatcctgattccgattcctctgcaaagtctccagccatttttctttccaaagccaattcccccattctgtgctgcccacccacctctgcctcccattcttctttatcccattctgattgccaattttcccacaaattctatcccagttccctaacacagtaatagtctcccccatttctctatggttctttcctgtgcccagactcaacatttctctatccatccagacttcccaagctgctcatctctcttcaccccagaaaataccctgacatcctaatgcgttccaatactctgacctccaattactcccctccctaaacaaaatactcaaacctccatccattcctcttcatcccaacccaactgcctgcctatttgcctttccatcctaatactctagcccccgtatccttctccatcctattaaaagcctgaatcccctctcccatctctcttcttctgctcagataccctaaaactcaagcttcccatctctttccattaattattcaattttattgagcaacttttatgtaggaagaaccatgctagaatctaagctcaagatgcagaagattttatctccctattacccatgatctctgcaccaagcagtctccttcatagcattttataaccattatttgtgaaactacttggttgttgcctgtttctccttctagactataagctacaagagagcagaggttttgtctgttgttctataaacaataaatatttgttgactgaaggactgtactaaacacttagacaataccaaatttaaatcctcaaagatttagctgtataggatcagaattattaacctgatttacaaatggcaatgtacctgaacagttaaaagcttggattctggaacgaaacagcctgagttcaaattctgattttccacttactgtgtgatcttaggcaaattacttaacctctctggtcctcagtgctatcactttttaaatggggatgataacctcatacaagttattttaaattctaaatgaggttaatacgtgcaaagtgcttaaaactggatctgacaaatagtgaacacccaaaaatgattcgcaattatttggacaaatgaggaaacatgatcaggaaggctcagacacatatccagggtcacagacctggttaagttacacaaggtggcagaattgaggcttcaacccaagtttgtctggcttcaaaattctctagtcccttaacgaatataacggaagtgtttgttcttccccttcttttagcatttcgtccccatatcctgtcatctttctccacgcactgtactccgtccgataccgtgacaacccgtcaggacgcccaaactgtcctttctcccgctcactccccacagacagctggcacatcccagctctcccctcagctcaggtggcaggacccacaaccttctgggcgccgcaccctaacttccacacctccccacactctggttcttcatccccaatcgcccccgccgtccccacctcttcccatccaaacctccctccttcatccaccgccccacgcccgttccgggccctcccctctttcccgtccaatcccaattcccagacacgcgcccccgccccgaatccatcccaagccggcccacaccacgcccggtccgggccttcccgcctttgccgccggcccccactgctcgggccggatgccggggaacgggctcggccaggtctgacgctcaccgcctagaagccgagccgagcagtcccgcaggctgaggtagagcgggagaagttcgggctctttcctcaggggcccagcggcgcggcagccattttgttgtgttgtgccggttgccgaggggccgcgcgcgcgtggtcggggctagtctcagccacgcccctctccctctccggtactgttggaagggacgcggaggcgtttcccgcctcttttgcagccagcgcgctaggatgccggggagtcttgggcgcgaggcttccggccgcgcggggccgacgggatgcggtgccttcgccttcggattgcgttgcaggtgaagtgtcgggtgcagagtcagggggagccgaggtttcatgcggcagctgcccgcagtgctgtggccttcgctgagacaaagctgccgccgccaccctctgaaacacggacacgcttctcagggcctgtgtccgaggacggcctgaggcaccggcgcagcgcctccccggcctcccccacttctgatgcttgcgcgctatgagcgagtgttcttatcagcacacttctctctgacagtcgtatctaaagcgaattccctccagggaccgaactgcccaggctcggatgaacctcaaagcggacgcagcctgggctccagctgtcgcgtgaggttcagggagcttgggaatcctaggcagaggatgttcctctgattgctacaagggagttaaagcaagaagcacttgcacaggcttcatctggggcttgcccatgagcacggcgttcacgacatgcattcaacagatattttaaagaatttagcagatactgggctggatgctagggaaacactgaagttttttttaaagtgttatcaccattgacgcctttcactccagtagcctcccgttttgaaggtataccctggaccatgttaccatcagaggctgcacccgctccagaaatccccagtgcaatcgctccccatccttgactataatcctatcatcttagcagcgtgcctgctcaaaagacccctatgccagcgtatttctaaacttccttgcgtcttccagtcccttgttcttaccattttctcgcgatcattctatcctgtcttcatttcctttcttcactacagagtttataggccacctgtataacacttttagaaactccctctctctctgtgtctcagtttccttatctatgaaatgaggtccttttacctattaacacttcctacagttttcctgataattataaaagtgaatcctggccgggcgctgtggctcatgcctgtaatcccagcactttgggagaccaaggtgggaggatcacttgaggtcaggaattcaagatcagcctggccaacaaggtgaaacgccgtctctactaaaaatacaaaaattacccgggcgtggtggcgcacgcttgtcatcccagctgcttgagaggctgcaggaggatcgcttgaacccgggaggcggaggttgcagtgagccgagatcgcgccactgcactccagcctggacgacagagcgagactccatctcaaaaaaaaaaaaaaaaaaaaaaagtccagttttcctgataattataaaagtgaatctctgtgaaagaacttagaacagtgagggacccatagtaagttctcaatatgtcttagatatttcattattagacaaaggttacccagaagcaatacttctttctacgcccaaaagaagagtttaggcaaggagtagggaggtggggaagaatttgcttggcaaagggaacaacttgtgcaaaccccggaagcgggggaaaagagcttggcaatgtgctgaatgttaagtaattcagtgtggctggaacaaaacatgagtatggaaacatgaagtagttcagtatggcttgtgcaaaaatctggggtggagaagctaaatctggaaaagggaccatattataagcagtattaggcacttcatttttccttaaggcagagatggcttcacctctataggaaattcaggggacgtccaacagggaataagctgcaataaacatggggatgcagatgtgtctttgatttactttgatttactgatttccttttccttttacttaaatgtgattcccattgacatttaagtgaatggtgctgtcctctccccaactatttacacgacacagaacgaagcccttggagtttaaacgcagaatttttgaaaagctccacttaagaggagattacattcattttttttcttttcttttttttttttttttttttaattttttgaacagagtctggctctgtcacccaggctggagtgcagtggcaggatctcggctcagtgcaacctccgcctcccgggttcaagcgattctcctgcctcagcctcccgaggagttgggattacaggcacgcaccaccaaggccagctaatttttgtattttagtagaaacagagtttcaccatgttggtcaggctggtctcaatctcctgacctcacgtgatccgcccgcctcggcctcccaaagtgctgggattacaggcgtgagccaccgcgccctgccgagattacattcatttttaatcgaagttcaggtgatatttattagattggaatgtgtacgttgctgagtttcagttctatttgcatatgttttgacacccatcgtttcggtttcttgtacccagaaacttagatttattgcgtaacctcattgctgtgtccctcaaagtctgtaatggtattcacgtgggatccattatcaagccgtggtgtgctgatgtagttcattatcaatcatattagtatcaattaatagccatcaaatatacataaaaagtccagagggtggcgcaaaacacttttctcttgggtgatctctcagtccgtatccagttagccgcggatgggcactcaccggtcccatgttgcccccttttcctcctcatacagacctctgctggtgtctagcatcatctctaacgaagctagagacttcaaaggagagacctttctccagttaatttgaatattaactgtctctcttagcatgctaaaagaacttccttctccaaagcagaagtgagaatacgaaagtaacgcagacaactcgcgttccacactatttttctttatctgatattatgaagaatgtactctgagttgcatttacaatacaaatattagccacgtcagggtgaccaagcttttactcagtcttttttccaaatgatagcaaagctattctgtttaaacttccctcagctttttgcaacccagtttaatcattttgcgaatttgttttagagaagaaacagactagtttgtcagacagggatggcaactttcattattgccatttctttctgtgactggccagtgtgattttgttgttttgttttttaagacaaggtctcactctgtcacccaggtttcagtgcagtgacacaatcataactcactgcagccttgacttctcagactcaagtgatcctcctccctcagcctcccaaatagctcagtctataggtgtgcaccaccacacctagctaatttttaaactttttgtaaagatggggtcttgctgtgttgcccaggctggtcttaaactcctgggctcaagcgatcctcccacctcaacctcccaaagtgctgggattacacgcatgagccagcatgcccagcctgatttttttttaatttttattcatttatttttttttgtttttgttggtgtgttttgttttttgttcttgtttttgtttttttgagacagagtctcactctgttgcccaggctggagtgcagtagcacgatcatggctcactgcaacctccacctccagggttcaaacaatttttgtgccttagcctccccagtagctgtgattacaggtgtgtgactccacgcccagctatttttgtgtatgtgtgtgtatttttagtacagacagtgcttcaccatgttgatcaggctggtcttcaactcctggcctcaagtatccgcttgccttggtcccccaaagtgctaggtttgtaggtgtgagtcaccatacccaaccttaatttttatttttaaatgacatgtagtaactgtacatatttatgggatacatagtgatgttttaatacatataaatgtatagtggttggagtaattagcatatccatcatcccaaacatcatatgtttattttaggaagatttcataccctccttctagctatttgaaactatataatatattattgttaactatcctcatcctatagtaagtatagaacactagaacttattgctcctatctagctataattttgtatcctttaagatatctttctctccttcccttccccctgctacccttcccaacctttagtatcctctgttctactgtttactcctatgagatcaacatttttcagcttcgacatatgactgagaacatgtggcatttaacttactgttcctggcttattcacgtaatatactgtcttccatttccatccgtgttgctgtgaattacagtatttcattcttttttatggctgaatagtattccattgtaagtatgtatgtatatatatatgaatacgcacacacacacatatatatacacatacagaatatacatatatatatacacatacagaatatacatacatatatatatatatatatatatatatatatatatatatatatcacccttccttccttccttctttctttctttcagaattttgttcttgttgcccaggctgcagtgcaatggcatgatctcagctcaccgcaacctctgcctcctaggttcaagcgattctcctgcctcagcctcccgagtagctgggattagaggcgcctgccaacatacccagctaattttgtatttttagtagagatggggtttctccatgttggtcaggctagtctcgaactcctgacctcaggtgatccacctgcctcggcctctcaaagtgctgggattacaggcatgagccactacgtctggcccacattttctttatccattcatctgttggacacctaggttgattccatgtcttggctattatgaatagtgctgcaataaacatggggatgcagacgtgtctttgatatactgatttcttttcctttggataaatgccaagtagtaggattgctggatcatatggtagttctatttgtagtttttttgaggaacttccacactgttctccatagtggatatattagtttacattccaccaacagtgtatgagtccctttttctggctgggcaaggtgactcacacctgtaatcccagcactttgggaggctgaggtgggaggatctcttcagcttaggagttcaataccagcctggagaagatagtgagacctcatctctactaaaaatcaaaaccattagctgggtgtgatggcacttgtctgtagtcctagctacttgggaggctgagtgggaggattgcttgagcctgggagattgaggctgcagtgagctatcatcatgccactgcaatgccgcctgggcaacagaaaccaaaaaaaaaaaaaagagtttctttttctccacatcctccccagcatttgttgtttgctgtcttgataatagccatcctaactggggtgagattatacctcatagtggttttgatttgcagatttgcatttccctgatgattgatgatggtgagcattttttcatatatttgttggtcatttgtatgtcttctttttgagaagtgtctattcagattatttgtccatttttatacaattttgttgttgagatgtttgagttccgtgtgtattccagatattaattccctgttatatgaatagtttgcaaatattttctcccattctctgggttgtttcttcactatgttgattgcttcctttgttgtgcagaagccttttagtttgatataatcccatatgtttatttttgtttttgttgcctgcatttttgaggtcttattcataaaatctttcctagaccagtgtccggaaccatttcccctatgttttcttctagtagttttatagtttctgtcttacatttaggtctttgatccattttgatttatatataaactcacgtacaaggtttttatatagggggagatgtagggatctagtttcattcttctgtatatggatatccagttttcccaggaccatttattaaagagactattctttccccagtgagtgttcttgacatctttgtcaaaaaaccagttggctgtagatccatggattaatttctgagtcctctatgctgtttcatttgtctggctatctgtttttatgacaatatcatgctattttggttactacagctttgtagtatattttgaagactgttagtgtgatgcctctagctttgttctttttgttcgggattgctttggccatttgggttcctttgtggttccataaaaattttgagatttttttcctatttctgtgaagaaaatcattggtattttgatagagattgcattgaatctgtagattgttttgagtagtatggtcattttaataatattgattcttctgatccatgaaaagtgagatgtctttccatttgtttgtaccctcttcaatttcttccatcagtgttttgtagttttccttgtagcagtcttttacatccatgcttaaaattattcctaggtgtttttttaatagctattgtaaatgagattgccttcttgatttcttttttagctcatttgttgtttgtgtatagaaacactactgatttttgtatgttggttttgtactctgcaactttactgaattcatttactagtttctaatatatttttgtggaatctttggggttttctacatatagaattatgtcatctgcaaatagaaataattttacctcttcctttctgatttttgatgtcttttatttctttttcttatctaattgcacttgctagttcttccaatctatgttgattagaagtggtaagtttgggatccttgcattgtaccagatcttagtggaaaagtttttaggttttttccattgatgataatgtgcgctgcaggcttctcataaatagcctttattatgttgtattagtccatttttaccctactataaagaactgagtaatttataaagtaattactgagactgagtaatttataaagaagagaggtttaattgactcacagtttcacatggctggggaggcctcaggaaacttaaaattatggtggaaggcaaaggggaagcaaggcacatcttttgaagcagcaggaggagaggggaagtgccacactattaaaccatcagctctcatgagaacttactccctatggtaagaacagcatggggaaactgcccccatgatccacccacctcccaccaggtaccttccctgacacgtggggattacagtttgacatgagatttgcgtagggacacagtgccaaaccataccatatgtttcaaatgttgaggaattttcctctttttttttttttttttagatggagcctcactctgtcaccaaccaagctgcgaatgcagtggcgcgatctcggctcactgcaatctccaccccccgagttcaagtgattctcctgcctcagcctcccaagtagctgggactatgggcacgcaccaccacgcccagctaattttttttgtatttttagtagagacagggtttcaccatgttcatcaggatggtctcaatctcttgacctcatgatccgcccaccttggcctctcaaagtgtgggaattacaggcgtgagccaccgcgccctgcctatttttttttttgagatggagttttactctatcacccaggctgaagtgcaatggtgcaattatggctcactgcagccctgaccttctgggaccaagcgattctcctgcctcaatctcctgagtaactgggactacaggtatgtgctaccatgcctggctaatttaaaaataattattgtcaagatggggtcttgcagcattgcccaggctggtctccaatttctggcctcaagtgatcctcccacctcagcctcccaaagtattgagattgcaggcatgagccatcatgcccagccaggaattttcattttatacccaaactgttgagactgtttattaataaaggatgttgaactttgtaagatgctttttctgtgtcagctgagatgatcatgtgtttttgttttttttttttttctttttttgagacagagtcttgttctgtcgcccaaggctggagtgagtgcagtagcgtaatctgggctcactgtaacctccacctcccaggtttaagcgattcttctgcttcagcctcctgagtagctgggattacaggcacgcaccacctcgcccggctaattttttttttgtatttttagtagagatggggtttcatcatgttggccagtctgatctcgaactcccgacctcaggtgatctgtccacctcagcctcccaaagtgctgggattacaggcatgacccaccacaactggcccaaagctatgttcgtaagtgcatgaaggctatgactgttgcaactttttagtaaataataattattctccacattaaatatttctctttgctcacttaaagttgtgagttctgtttacctaaagttattagttctctactagcttgaattttgtcagtacttgcctgacatatggttttcttttttttaattttcagtctttctatatcatttagtggtgatgtataccttttttttttttttttttttttaagatggagtctcgctctgtcgcccaggctggagtgcagtggcatgatctcggctcactgcaacctctgcctcccgggttcaagtgattcttctgcctcagcctcctgagtagctgggactacaggtgcacaccaccactcccggctaatttttgtattttagtagagatggggtttcgccatattggccaggctggtcttgaactcctaacctcatgatctgcctgcctcggcctcccaaaatgctgggattacaggcgtgagacaccgcgcccaacctgttgctgcatttttttttgttctttggctgtttcaaaaatgtctaacttttaatagaatattttaagcccattcaagtttgttgcatttgtacttattcctgttcttttacattttctattgaatatgttttcttacagtttctttacatccttttcagctttttgctgattatcttgggtatatccttcttctttacccttttattaaaaattatactagtttttattataaaagtaatgctgggctgggcgcagtggctcacacctgtaatctcagcactttggaagaccgaggtgggtggatcccttgagctcaggaggtccagaccagctaggaaaacatggcaaaatcctgtctttacaaaataaaaataaaaattagccaggtgtggtggcatgtgcctgtggtcccagttactctggaggctgagttgggagaatcgcttgagcgattcgaggctgcagtgagctgtgatcaaggagtttgaggctgcaatgagctgtgattgcactgctgcactccagcctgggtgacagcagaaagctgtctcaaaacaaaacaaaacaaaaaaagtaatgctgtatagaggaatgtgaagtataaggtaaaagcccttggccctgccacctaactgctttccaagatattgtcattgtttactatttttatatccttccagcaattttctccgcaattttctctacctataaaaatatattggctgtagatccatggattaatgtcctcctccctgactatccaaaatttataaactgaaaggaggaccagctttatcaagaatctttttgtcctctttgatggaatgttcctgtggggatttttcagtttatactaatttatactgggatgatttcagctaattctgatttctttagaatgtttttaaatttaaagctaaatttaactttatactttcatatatatatatatatatttttttagatggagtctcactctgtcacccaggctgcagtacagtggcacaatcttggcctactgcaacctctgcctcctggattcaagcgattctcctgcctcagcctcctgagtagctgggatatttattacaggcaccgccaccatgtctggctaatttttgtatttttagtagagacggggtttcaccatgtcagccaggctggtctcgaactcctgacctcagctgatccgccttcctcagcctcccaaatcctcagctgggattacaggcatgagctgctgtgcccagactattttatatttttgattccaaatttgtagtttgaattaagtttaactctatatgtttaaaatttaatttaattgacattcagctttagaagtcaaacttagaagatctgatattttaccaatgcttttgaatttaaattttaaaaatttaattgatagaaatacaaaattaaagttgataaattatttgaggaatttatgagagaatataaaaattgctaacatttgaaaaagtataaaatgacattcaaaatatcagattctatcacatatgaaaatctgcagcaataattctatcacagatgaaatactgaaatcttggggtctaataagaactatcaggaaatgtatttttgttaacagtttcaatatgaaagttaacaaaacactcaaagaaataaactaggaagcaacagaagctagtttatagttttctggagctataacaagtattgtttaaaacttacaacgaccctgttaggtggacagagtagacaatatctcctattctacaaatgaaaaaagtgaagttaacttaagattgaaaaacataaaatctcaaatacataaaatcatactcaattatatattacagagaaaagaaatggaaatgagaaatagagtaggaaaaggaaaaaagaataatttaaaaaaacaaaaaataaaaagaacaacaagaacaaagtgaataagtaaaatttaaaagaactgaaatggaagagatgggggtcataggtcaatgctggtgagattcatgagaagcagtgatataattcttcttacaaagaaatatctcaagattcattaatgggataatattccccattttccccagaataaccaccagttttaaaagttaactagattttggaaggcatttttgcatccttatctttttataattttcactggaataaatcactaactttttatcctgttaaatggggaccatcatatcttatttcatagggttaaagggttaccttcatggaaaagcattgcagtcctatgacctttctggatattgctgcaaacaatttttcaaaaacattttgcacattgccactacagcataaaaatagaagcatttctaaattaaggttcaaatctaacctacaggtcaaattttccaggttgctctattctattatttaattttaaattttttaaattccagttttaacaaaaaattacaagacaagcaaagatgcaggaaagtgtagcccatacaaggaaaagatataataaaaaccacctgaggaaatcttgatctcctagatatggactttacgtgagatattttcagtatgatcaaataactaaaagaaaccacatctaaagaactaaagagaagtgtaagagctacgtcttaccatacaaagaataagacgaaaattataaataagaaccaaatagaaattctgtatttgaaaactacaataactgaaataaaaaattcaatagggacactcaacagcagatttgagcagggagaaaaaaagaatcaatgaacttgaagatagatcaattgagattatccagtctgaggagcagaaagaaaaaaggattaagaaaaatgaacagacctgtagaccatctggtatgccatagaaaacacaaacatatacataaagacagacctttggtataccatcgagcataccaacatatgcatgaagagagttccagaaggagacgagagagagaggaaaggacagaaaaaaatatttgaagaactaatggtcaaaattttcaaatgtgatgagacacattaatccacacattcaagaaaactcaatgaactccaagtatgataaactcaaagagaaccacacctgactacatcataataaaactgtcaagtgtcaaagatgaagagataatcttgaaaataacaagagaaaagcaacacatgatagtacaaaggatcctcagtaaaattaacagctgatttctcatcagaaagcacagaggctactaagtagaaagatgatatattcaaagtgctgaaagaaaaagactgtcaaccaaaaattctgtaaataccatcactttggtgattaagattcaacataagaatttcaagaggacacaaacattcagaccgtagcactaatgatcacagaacccaagggaagcagcttgatgttatctagttgtcttaaaattttctcatgttcttgacattctttgtttactctgccaataccttgccttgtgttattagaggagattccttgtgaagtgttaagagatttgtctttgaagtcagatatgagtttactcctgacttagctactccaaagctggcttcatgagcatgcaacctatgcagtcaccccaaaccccacacgcagaagggccccacacttggtttaatgctctgttgttgtcctgcatttattaataattttatctttgagcttgttttttataaatgaagtctgacagcacgatatttatgtccacaattccttgcctcctcattcacacagagcattcacaataccctgtgaacacagaattccagtgggctcacaaggtgcagaagtttagtgggaatcaaagtgagtacaaagtattaagaaaagtatgtctgtggctgagcaagccggggcactgacagcctgaagagaccacattctccattggaacaggaacttgttttgagtgcagaaagatggtgaaggcatgctaaaaaagaaaaaaagaaaaacaacaacaacaaaaaaacaaggagccttatcatatcctttcttactcatggtatttccttgtattagggaactattatgtgtaccttgaatatgataacatagaaagaaagggaaagataggataattcacagtttctttttctttcaggctttccttgtcctcagaaagcaaaggtggagagtgtgggtagaacatacacatatcaaaaagtaaaataaaaacagctgagctagttttgtgcataatttccactgttctgggaagaatggaatatatatacatgtatgaactatgacatacaaatggtgtaattttggcaattgcacatgcaagtgaaatgctgttatatttgcagcttaaactggtacacaatatgaagatgaatgataaaagtcatgccaataattaaagttattaatttccctttatttacaatgatgttaaatagcaaatcttaaaaagcaccatgacaaattgagggaaagactacagatgaaaggaaaaggcttttttttgagacagtcttgctctgtagcccaggctggagtgcagtggtatgatcttggctcactgcagcctcgacctcctggcttcaagcaattctcgtgcctcagcgccccaagtagcggggtttcaggcacatgccaccacgcccggctaatttttgtattttttgtagggatgggtttttgccatgttggccaaggtagaggaaaaggctttatgtttatattttaataccttaacagcatttttcctgcttttttgaataagagatgccacatttttatcttgcacaagatcactcaaattatgtaagtggccagagctacttttttgtgtgtgtgattctgggcttttattattatttttgagacagagtctcgctgtgtcacccaggctggagtgcagtggcacgatctccgctcactacaacctccatgtcctgggctcaagtgattctcctgcctcagcctcctgagtagctaggattacaggcgcccaccaccacacccagctaatttttgtatttttagtagagacaaggttttaccgtgttggccaggctggtgtcgaactcctgacctcaggtgatctgcctgcctcgacatcccaaagtgctgggattacaggtgtgagccacttcgcccgacctgattctgggatttttaaatgaagcaatacagaccttctgattatcagattctttgtctgtaaaatgagtataatgctgaatcattccaaccaacatcaagtgacttctgctgctgggcaattattttattaatttaatattttctatataacttttatgaagagatccagaaagcattctaggggtctcaggataaatagggggaaataaaattacttagagtcagctgggtggggtggggagggatagactaagtgttttgagagatttggcagttattttggaaggaaaaaaaaattcaaagattttgtgatacctggttttttttcttgtaaaaaacagagactttagcatgtcttcttttaaaaataattgaagcagaaagaaaagagttggaaaagcaagaaacagtaatcctagaaagagtaatcataagaactccataaatgtttatgtgattttcagtgctaagaaagatcgcatttcagcattcttaagaagaaggcaaagcagctgttatctcaaggaagcaaagaagctggttctcagaagagttattaatgtaagatgagaagccagagtttaccatgaaaagctgtcgcacctaagcattgacttaatcagcacgaattattccagctttctttgggaagctattaagttaataccagcaggtggcgctttcaaagtaggctcctgaagctgctgctcttcaggaacttaaagtacacttgctaattataagcattgatgaccgaggagcaaggacctatttgggtggtggtagtgaatgtaaggagctttgatgaaagttatatttttagaaaaacagctaatctagtgtaaaattactattgctatgtaataaattcccccaaacttaatgacgtaagataacaacacaccttaattatctgcccagttcctatgggcaggaattcaggaatggcttagctaggtaattctgggttaggttctcttatgaggttgcagtcaagatgacagctgggctgcagccacctaaaggcatgactagggctggaggattcacttcacatggctctgggcgggaggccgtggttcctttctacgtgggcttctccataggcttcctgagtgtgctcactacatgggggcttcccctagaacaggccgttcaagagagaaaaaggcagaaacagcaatgtcttgtatgacctaacctcagaagtcacacatcttcacttttgctgtattctattggtcagatgaatcggtgtgatacagtgtgggaagggaccacacagaggcatgaatacgagggaggtaaggaccactgggagccatcttggagtctggctaccacatttagccactggatgagtaacaggtattagaattagatgaaggaacttatgctgaacaaaaagcaacattgtctgaaaaagcgtggctcagtggaaccaaagaaggtggttaatgagctgagcttgattcattagaaggtctagggtacagaaagaacagattcaggtgaggttataaaactgtgagagataaagggagagtgagcatctcctccttgtatgttgtttccttttgattcctctaaggaaaatatgcttaactaaattccattattaacactggattttctcttagccttattattttccacttcctccctacttccttatctgaaatcctatcctattccattattatttaggatgtgaagtggccttttgggacatgctattccaacccactgctttggtgactttcaagcatagtttaagcaatggcttccttctctatttttcccagttaccattcaatcttcaaatacaaatttatccacggtggatttgaaccactgtatttcccagaatgtggcttatccagttattctctgactctttccacctctcaccttttcagtttgtcttcccaatctgccatctgcctggtggtcatttcagccagtcttgctccagctctattgaggaagggagaaccagacataagccagactaggtattcaattatgtcacatttattcccaccttgtgcatttgaacctttgcctagaatacacaatagtatataataagaatcaaaatgtgtggactgggatataaattatttaagagtttataaaatacagaattagttacagacaaaaaaggccgggcatggtggctcacgcctgtaatcccagcactttgggaagccgaggtgggtagatcacttgaggtccagagttggaggccagcctggccaatatggtgaaaccccatctctactaaaaatacaaaaattagccaggcatggtggctcacccctgtagtcccagctacttgggaggctgaggcatgagaatcacttgaaccaaggaggcagaggttgcagtgaactgagattgcactactgcactccagcctgtgtgacagagtgagaatccatctaaaaaaaaaattttatatatacatatatatacacacatatatctggagaaggtgtcaaagagaaggtaagacttcagcatggtttcgtatctttcctggcttttttctatggatcccaaacaatcaaatcgaaatttctgcaaattattagatgtgttccctgaagcactacatttttctgagccttagtttactcattggtaaccagagggtaataacacccttctgcatggttgtcaagataagagataatttagcaagttaattatcacaataactgataaatgttggaagctaataatgggtagctattgtgttgtcaccatttggataagctccttaaaggctgagaatacatcctgtatgtctgagtctcataaaatctcgtttaaatgcagtggagtttacaggtcttattgagacgtgattaacatttatggcatttcctcttaattgctagactgattactgagaagcgagaagaatgcttcaaacaacaccggatttaaagtctgagaaggatattttggagcaaagaacttctacaacttatgagataaagaagtaggttacacggaatctactaaaggcaatcaatgccataacaagagacaaaactgtttagagtgccttctaaaaaggattctagtccatttacactcatttacttgttattattaatcagtaaggacttagtattgacattttgttactcgttttctgcttgttttgttggtcctctcttcctttcttccttcccatcttcctttgtgtaaaagtgattttctctagtagtatgttttaattccttgctttttattttttgtgtagcaattataggtttttggtttgtagttatcatgaggcttgcaaataacatctcataaacaattattttagacttataacaacttaactattatcagaaagaaaagtttttaaaaacaagcagagaaagccaaacaaacatctacactttttcctgcattttgactttttgttttatctatttgtatctttttacatggtctgtctcttaaaaaataattgtagttactatttttgataggtttatcatttagtcattctattaagtatatgagtggtttacatactgcaattacagtgttacattattctgtatttctctgtgtaattatttttaccagcgagttttatacttttagattatttcttcttgctcattaatagccttttctttcagattgaaaaaacttcctttagcatttcctataagataggtctaatgttgataatattccccagcttttgtttgtctaagtgtttctccatgtctgaaaaataattgtgctggatataatattctaggttggatgtttcttttcctcagcactttgactatgtcatcccacaagcctgtaaagtttctgctaagaaatctgttgccagatgtattagagctcctttatgttacttgtttcttttctcttgctgcttttaagatcctttctttatccttgatcattgagagttttattattatatgtcttgaagtagtcttatttgggttgaatctgctcggcattctttgatttttttgtacctagatattcatatctttctctaggtttggaaagttgtctgttatcatttccttgaataaacattctatcccaatttttctctctctctctctacatcccctttaaggctagtaactcttaaatttgctcttttgaggctattttctagatcttgtaggcatgcttcattcttttttctttttagttttttcctttttctcctctgtgtattttcatatagcctgtcttcacaaattctttattttgcttgatcaagtctgctattgagagactccagtgcatttttcagtttatcaattgaattttctatctccaagattttttaaaagaaattttcatattttattgataaaataatacgtagtcacaaatattgggggaagaaatgtagccatacacttctttgtcttagtaatctatattttagccagctccagaatttccatttgatttaaaaaatttcaatctctttgttaaatttatctgatagaattctgaatttcttcactgttgtcttgaagttcattgaagttcatcaaggcagctattttgaattccctgtctgattagtcatatatcttcaacactccaggatcggtcaatggtgccttattcagtccattcagtgaggccatgttttcctggatgttcttgataattgtggatattcgtccatgtctgggccttgaagatttaggtatttattcccatctttatagtccaggcttgtttgtccctgtccttgagaaggttttccaagaattcaaaggggattgagttttgtggcctaagcctgtggttactgcagccatctcagcacttgggggtgccctaagcccaggaacactgaaactcttacagactcttaggtacacagccttggtgtatctaagacttgggaagataggggagaattccctgggttaccaggcaaagtctctttctctcttccctctctttcccaaatcagaaggcatctctctccaggcttggctaactggagctgggggaggagtgatgcagacactctactggccacagctggcattacactgggtcatacctgaagcccatggccttccagaccagctctgtattggggctcaccaaggcctgcagccactactgcctggttatgcctgcagctaatgtttattcaaggcccaaggccacattagtcagcagatggtgaatcctgccaggaccaagtccgtaccaaccgggcagtggattcccttctgacccaggatgggcctagaaacactatccaggaacaaagcctggaatcgggggcttcgggaatctgtttgatgttttatcgtattgtggctaagctgatacccaagttgcaagacaaagtcctctgtgctcttctctcttctttccccaagcagaaggaatctctccccaagcatcagtacctgaagtttgggaaggagtgacatacatactcctgtggctgccacagctagtgttaaactgtgttgcaccctaagtccactgcctccaagaccaggacagcactagaccttgcccaaggacttgctaacagaggaaaaaaaatctgtgaaatatttcagagtggaatattttgagccaatatgagtgatcatggtcttgggaacagtcttaagaggttctgaggaagtatgcctgaagcaggtaggttatagtttggttttatacatttccaggagaaaagagttacaggcgaagacataaatcgatacatggaaagtatatattgattcagcccaaaaaagcaggacatctccaagcagggacttagtagttataggtgggtcttaaggattcttcagttgacaattggttgagagggttaagctattgtctaaaggcttaaagtcaatagtaagtaatgcttgagttaaaggaggttgtggggtccaaggttcttgttacgttgatgaatcctcataggtagcagccctccgagagaatcaatggcaaacgtctgtctctttgcagacctttgagatgtcagactctcagttcaactctgccagaactgggaaaagcctagaaagggaaggcctggttgcattaatggagattatctacagatgcaaatctcactcacaaaagatagctttgcagggccatttcaaaatatgtcaaataaatatattttgaggtaaaatatttttattccctacagggtctgctatctgtcatgtgatgctatatcagagtcaggttgaaaagcaaaccatattacagcaggtttatttttatttatttatttattttgaggcagcgttttgctctcgttgcccaggctggagtgcaatggcacgatcttggctcactgcaacctctgcctcccaggttcaagcaattctgctgcctcagcctcctgagtagctgggattacaggcacctgtcaccacacccagctaatttttgtatttttagtagagatgaggtttcaccatattggccagactggtcttgaactcctgacctcaggtgatctgcctgcctcagcctcccaaagtgctgggattacaggagtgagccaccacgcccggactataccaggttaacttttaaaactcatttaatgatattttatggtttgtagggtgtgattccttgcatgaatggcctgaggtcttgtttataatttggtatcttattgccacagagtctgttttgtccgtcttatgatattttaacttgaatgctggtcagttgtgcctaaactccaaagggagggggtataacaaggcatgtctaacctcccttcccatcacggccaggaattcaatttttaagatgtttctggggtctctttggccaagtgggagttcattcagtcaatagggggcaagttgggggtgcttagcattttatgtttagtctacacactttagtccttgtgtcctgactgccactcaaatagactcaggacctcagaccactttagttagccagtggtgaagctagccatgacctgggtttctccctctggagcacagaattctcctctgtcccaaggcctgcctaaatgcactgtcagaattctaggcgcctgcagaattctgtcctgtgttatgttccaccatgacggggcagcactgacttccagtgcaaagtcccacactcactttgctctctctcctccaagcacacggattctctttcctgctgtgcagcctgtggttggaggaggggtggtataggcaatacagggagatcttcccccctacccccaccctatcttcaatgcctctttccttatcattacggtaaaagtaggcactgtgatcactcacctgattttatggcttttatgaaggtgctgtcttgcgtggatagttgttctatttggtgttcctgtgtggagaactatctcggggggggttctattcagccatcttgctccacctccgccctctctccagtcagtctttaaactgctggcaccgaagcctccagtgcctttctcctctatatcccatggagagttactgaagtagttctttttggatttcagttggccttttagtagagcctttctcctaaaggattaaaacgtgagactgcgggcttgagccaaaaagcagtcagagggacaaatactgggttttacttagaataacccacctgcctagtgccagcctaccactcttgaacaaaacttgtatgattcccgtgtctccatttagaataatttaattctgaggagacgcctctgtttctccactggcctctggacatggaacaggcacatgaaaattacctggggcagctatgggtcacatcacctctcttactctagccagccagcaggcacttgaagttcgcaatctgatgggctgaatttctgaaaacaataacaaacacaatgtcacttattttttattctctaaatttacaacccattaatatacctccctgtaagctgtctgattttgaaaattatacatgataaaatctttttattatacataaaaaagagttctgtagtttgtattaatagaaaattggtgtccagacatattttaccaagtaagtacaaaataactaaagaatatccatttgaaagatacaaaattattatcctgctaggagcaccttggtgtcaaggtgacttcagggaataatcaggtaattcagctccttggccggagtgaagaatggaatgttgaggctggagaactaagcagggctcaagaggggcctggtgcactaggctaggtcatttgggctcaatcatgaggggacaattgaggcagcattagcaggaaggtcaggtgaccaccaaactttctgccagatctgagtttcttctcttttagaaatgcagtatttgtataaaaatgaaaggcttaccaaaggtcacattttaaattataaagaaaaaaaatcatcttttttttttttttttttttctgagatggagtctggctctgttgctcaggctggagtgcggtggcgtgatctgtgctcaacctccacctcccaggttcaagtgaatctcctgcctcagcctcccaagtagctgggattacaggcacccgccaccacgcctggctaatttttgtatttttagtagaggcgggttttcgccatgttggccaggctggtcttgaactcttgacctcaggtgatccacccacctcggcctcccaaagatctgggattacaggtgtgagccagcgtgcccagcctcaaaagttcatctgtgagccacatttagaaggtagataaaaaattttgactaaacacagcttagaatctataaattgttaaacttcagttctgttgagaatctttgagatccatcattctctaaatgttttctaccagagaaacaggacaatggcttgcaaatattggttatcagtatttactctatagctcaagcaaacaaacttatttgcacttaaaatacaaatattacctaccttgatttgagtgttgttgttctctcttaaatttcatttcccaaaaatgatggcaaaagtactgtttgttttaacttgacccatcttttgcaacccagcttaatcatttcacagattcccttttgaaataaatgggctagatgatcagacaatagtggcaaatgtttgtcatttcaatgacatatgcaagagatacctttagtgaaatttgtatatcaaatttccctttgtgctccttttttccctagtgaattcagcattaaagtgtttataaatatttttggtttattatttattaattcaaagcaaagaatgccaatgtgaccataaatatctcatttatatatcataaatatctcattatagaaatatgtttagagacatctgttttattattttaaagaagagtacatattatatattaaggtaaaaatagtactaaaaaagagaaggtagtaaataaaaaaattctaatgaacataaaacatcataaaaattaacttaattaaaaatcagccaggcacagtggctcatgcctgtaatcccagtactttgggaggccaaggtgggtggatcacctgaggtcaggagttcgagaccagcctggccaacacggtgaaaccctacctctactaaaaatacaaaaaattagctggatgtgatgggacatgcctgtagtcccagctacttgggaggctgaggcaggagaatgccttgaacctgggaggcagaggttgccctgagccaagatagtgccactagactccagcctgggcgacagaaagagactctgtctccaaaaaaaaaaaaaaaagtataaagataaaattttagtatattgtgaattaattactagactcaattgttataggaagctttgtttttctggagctcttatattaaaattattaaaatcctcactgaaaagtataacatgtgttttctttaaaagaaagatattctatatctgaataaagacaaactttgaacgagtggtatatgccttaataaatattggagaatatctattctccaatacttagagaatgacgacagcatcctccacatggcgttttcattgccagtcacaactttcctccacctagtgttctctagactgagacagaccaaggaacaattccctagacctcctttgcagagctaggttatgctcagaccatttgcagcaccaaggacactgccattcaggtcaccaaaaaaagatcatcttgtgagccctgtctaaaccaggccccttctaaaatcatttcagtgtgaaactgagtccaggtgggtcttcatcagtattagagtggacctgccagatgtatgcttgcagatgatgcaacatcaaagcaaatgccctgggcaagagaagaaaggccaaagcaatgggcttactggtttctagctttgagccactcttcatagtgccaaattcccattttagggtccctttatttgtattaataaaaataaattccctgggtgtaagttcctgtaaagtactccctatctgtattcctgggcatgaaagggtgttttagttccaattctagttttcccacttagaggttcacctttctgacattaataattaaccagattatctgaattcttcaagttcagtttatttaaaaggagactatcctcaaaagtgttatatccgtggtttcctgctacctccaaccatgggccttttgggaatactttgttttttaatcttcctggggaaaacctggggacaggagcaaacgtaagtaaaacaagctatcttcatttttcaatgcatcttagttatgacgaatgaagagttaaatttaacagattctgttaacttgaaaataacttgctacttctgagaacagcaagtgaatagtatcatctctgaatgagaaagtcatggaagcattttgatttgatgagtagctaacaacatgacagcttttatggaattgttatttattaaaatttacgttaagtgattattcaaattcctcttcaaaaaagcacaaaagaaactccagataataaactttcttgacattttttgcttattttaacttggtgtttagttttctttgtgtttttcatagactatacacagttaaaccagggttatttaggagtcaatctaatactgtgatctgaaaatctgttgttgtagtgacttctaccatacatttatgagctgacttttcacaatttttagtgtcattattgagataatatgcattttaagtaatgttttaaaaataatgatcttatatctagaaatattttaatactgaaaagtaactgcagatcatctaatcaaacctattcattttatatatgagaataagtccagataagggaagtgactgaccaaaggtcacagttctagagagagagaaacaggatttttattaaggtctcctgtttatcacttcaatttttttcattttgtcataaatgtatacatgtaaatatattatatataaacacatacttaggatgtcattcttttttagcaccctcgtatttctgatctgtgatctttttacatggccacaagcactcaactaccttagcatcctgcctttattctttttgaaagacgagcagctaaggcttagagagactgaaattaagtgacttcaaattggtggcagaactagggctaggacctgggttccatgattcttgtccagacttattctgaattctttctactagcccttaataaaaattatttcctcactttctctgaagaagtcagagtgtaccatttacaacatggcaatcaatcactttaattaattggttgattgattgattcaacaaatatttattgagcatctaaacatatgataggcactgcagatatagcaaacggtaagacaattcctagagcttgcattctagtgggagaagcaagtaatgaatgaatgaaccaatgaaagaatgtgtaaggtcaggtaggtagtattatgaagaaaaaaataaagcagagtatgagaattaaaaaataattatggggcactattttaaaatgtggccaggaaaggttctcttaaggaggctgcactcaaacagagcctgaaggaagtgaggaagcaaaccatgcaaatatttgaggaaagagcattccagatagaggccaaaataacattcttgcctctctgcaagctcctgctcctctgcagcaattgaaagacaaagaaaactatgaaattatttatatggatagattatgctactgataagtcaataagaaccaaaatctttataaagggtggttccagaatattcttttaggggcttctaaacactatgtatttttgcttgacggctaccatcacatagaccagcagtccccaaccattttggcactagggacaggttttgtggaagacaatgtttccatggaccaggattggggtggggatggtttcagaatgaaactgttccacttcagatcatcaggcattatattctcataaggagcttgcaatctagatccctcgcatgtgcggttcacaatagagttcatgctcctaggagaatctaatgccaccactgatctgacaggaggcagagctcaggtggtaatgctcctttgccccactgctcacctcctgctgtgtagcctggttcctaacaagccatggactggtatttgtccatggcccaggggttggggacccctaccatacacaattcaaaattaaagcaatactaaacttaaaaacataaagcttctataaatactgaaattaaagtagctttatatccctaaatttttctaattacaaaactctttataaattccatttagtacaacagttgaaaatgttaattctggaaacgggctgctcaggttcgatttctaattctataatttgtgaattatagaattcataaatcctatatgtgtggccttgggaaaattaattagcagtttcttcaccttaaaattggagtaatagttcctcacagagtggttgtaatgacacaatgagtttatacaaataaagtattcagaatagtgccttatcacagggcaaaatttcagtaaatatatcttattatcataaaaactgaactcctctcattttctgccatctcctactaggcatgtggggaaggggaattcagatgatggttggaaatctggaaattctttcctctcttttgtaatttgcctgtaagtggatccaaattaattgtaatgcaggataactgtcagatgctttaaaggatttaattgctgataaattaattccattgttactaaaaacttcctgcttttaccagactcttaaaatgtcacaatgttggcagaagcctggaataattctgccaggtggggtggtgggtgccctccaagcttgttgggccacttgaattagtcgatcactatgcccttttgggttaaaacacttttttttcctatgtaatagcgtatgtagttctcgctattcaaattagatactcttgtgatatacacttagtaatccagtttatatttgtaagtttttaaataaaataatttttaaaaatcactcaaaagcatgtatagactcacttccattattgtataaatcacatgaaaagtaaaaataagagaacagtctatggttgtgaataacatataaacttgacctcaactgtacacataacaactgagaactcatataaaggcctcccccatttacttacaaaccgtataaccttagccaagttagccttttaccacttgcaaagtacgaataatgatagtaccagcatcattggcttattgtaaaaattaacaagagctgtatgtaaagtgctgatacagcctctgatatgtggcaagtacttaattaccattattgtttgaagatgatgatttgctcttaaaggaccatcatcactatttccatttccaaatgcacttcccagctcactcatattctatcctttccgttatccgtttactagtataacatagtatttctaagatcactccctttaaactaatttagtgagattaataaatcttaacatgtattgagtactaagagtgctagaccttttcatatatatgttcttatttaatctttaccagagcctggtaaagaaggcgattattttcacagtaagttattttagcctcagaaagacttagtgactttaccacggtcactcagccagcagatgccacagctggaattcaatcactgcttttttcttcattgagcaaaaaatattgaccccatttacatgttctggtcaacatgattaaaagtcttccttggctgcagtagctaagagaaagtgctgctatcaccttaactttctaaatgtaaactaaacctccagcttctcaggtcttaattccaaactacttggaaattatgctgaagttatggtgggtcacaagtacattttgacttattagtatcatttttaagtgaggaaatatatgtattttaaatggaatctctcaagtgagagaaaaaaatcaaaagtaaaagaaaatatgtcatataaagacattgagccttatcttttcctttttcaacagatatgtcatttcagcaccaaaaatattccgtgttggagcatctgaaaatattgtgattcaagtttatggatacactgaagcatttgatgcaacaatctctattaaaagttatcctgataaaaaatttagttactcctcaggccatgttcatttatcctcagagaataaattccaaaactctgcaatcttaacagtatgtatttatcctttattttctttatatatatatacagaatattctcaataaaaatgtgtacaaagtttgaatattgataacatatagatttaatcatttacatccactgtgggattattagatgatgtcagtcactaatgataatgtaagtgaaaattctaacagaaacagaaaattctaaacagaagttatgtctgctttttgagcaatgcatgtccattttcacattcttattggaaaataaaattgtactaatgtgaaaatatttggagataattgaaaatacttgtttgctatgaaaattactattagaaagaaattgagaaatatgagtatgattttatctgtagtacattgcccacaaaaatccatggatattattgaacattcgattgaactctaatattctacaattatagtttcaaaaactaaaaaatttgtgattactaaagtgaatagctctcattgacaacctgcagttaatagaaagaacaaccttgatcaaataactctcctattaagatattgtagtatagattgcttagagacatacttgcaacttatttttactaaaaattctgatacttaataaagaaaatcaaagaatatcagacgtaaaatgggctctgcagttcatttagaccagagtttctctaaagtgagttctttataaagaaattaaaaatggaaatttaataaagagcttaaaattcgaattatattgattttgtaacattttgaatttattttataaatttgttttgagtttttaattatacaaaaatcataagcataagattgtaccgttttaagtttgtatatatttaagtatctttgtatcaaaaattattttgattatgttataaataataaaaagccaatgctgagggtcctccatgacttttgtcctttaaaaggactatgcatattactcaagtttaagaaacactaatctaaaaaatttctagtcaaacataggaattctttaatgttcttagcagtaaatgctcatatctcttaacaaattcttccacttattaggtttgttaacaattaaaattcatttattaaaagtgttacttttatggcatatgcctgtaatcccagctactcgggagactgaggcaggagaatcgcttgaacccagaaggcggaggttgcagtgagccaagatcgcgccactgcactccagcctaggcaacagagtgagactccatctcaaaaaaaaaaaaaaaaaaagaaagtgttactttcaaaagacactcttttatctgatacaatgtatttgtggctcttagttttaaatttaaatcaaacaaatttaactgaaattaaaaatgcagtatctcagttgcactagcaacatttcaagtgttcaaatagccccaggtagctattggctaccatagtaaacagcatagatatagaatatttctgtcatcacagaaagttctctgaacagtgctgacctatatgattaactgaaaaactagattaaggtggggcaatcatagtcaatacatattttaaccatttaattttatcatagcaatatcatgtatctttatttgccaattgtttaatgttgtaccaaggtcttttaagtgtgggtctatggattgcagtgtcaaatctcatttattacgtgctacaaatttaatggatcatctttgttctatagtttcttttttgttgttgttgttgttgttgttgagacagggtctcgctctgtcacccaggctggaagacagtggtgtaatatcggctcactgcagccttcgcctcccaggttcaagcaattctcccacctcagcctctcaagtagctgggattaacaggcgtgcaccaccacacctggctaatttttgcatttttaataaagaaggtgtttcaccatgttggccaggatggtctcgaactcctgacctcaggtgatccgcccgcctcggcctcccaaagtgctgggattacaggcataggttactgtgcccagcctgttctatagtttctgtttcttaaaaggggagaaagaacttaaaggcacttacaaagcaatctgggtgcagaatatttatagatttttcttgttttccaaacttttacaataatttcgcatagctaattctacagcagttggtttttgtaattaactttcatcccgtgtttccaaagcctaatttttcatagatacacttttcttttttatcacttttcatgcattaaatttacatatcattgaatgtaaaggggataattacaaacataaattggaaaatgagcatctcaactcaggggagcagaaatatgtgaggtaatactaagggtccagagatgctggacacatgggcacggtgactgatgcctgtaatcccagcactttgggaagccgaggcaggtggatcacttgaggccaggagttcaggaccagcctggccaacatggtgaaacccgtctctattaaaaatacaaaaaaaaaaaaaaaaaaaagttagctggacatggtggcgcacacctgtaatctcagctacttgggaggctgaggcaggagaatcacttgaatctgggaggcagaggttgtcgtgagctgagatggcaccactgctttccagcctgggcaacagagtaagtgagactccgtctcaaaaaaaaaaagctaagggtccagagaatcggtcaggaggtttcacaaagggaatggggagcatggggtaacccagcaaactaattgagtgaaggtttcttaaaggcttttatagtagtagtttcactaaatgtatataaaatttaggaaacatggaaccaaagagactttcaattgcttaaagctaaatttttattatgtaattagacactgaagggcttcgggcaaaatttatttactcttcttgctcctgtatcactttttaaatgattacatatacatactgattgttctaatgagattacagttgtatttagaaagttaatggtttaataactttagaattattatactttttccatcaacaatttcttttccagatacaaccaaaacaattgcctggaggacaaaacccagtttcttatgtgtatttggaagttgtatcaaagcatttttcaaaatcaaaaagaatgccaataacctatgacaatggatttctcttcattcatacagacaaacctgtttatactccagaccagtcaggtagattataagatatttcttcctctgggtgggggatttgacagtattgacactatattgtagagctttttaatacctgaaattgagtggagatcggtttctttttaatttgctcaaaagactctcaattcccaaagacatctatacttacaaatatttaatagcattttaattttaaatttatggagaaagtgctaaataaattacaaaaccaacaattacattacctgccccatcacttatttccaagtagaaaatgctttttcaaaattgtaaaatgttgaatgttatgtaaaaatgtaaaatgttatgttgttacaaaaaccaactgctgtagaattagctatgcgaaattattgtaaaagtttggaaaacaagaaaaatttgttttccaatatgttacaatttattaaacaaatataagacttaattgcaaatataatttggcaatgggaaaatataatttattgtagaaccatgttcattaaaaattccactgggtctggagctaatccccaaactggaaaaataaatctaacctaggggatcagatatttcagcagaggataaactagatcacagaaatatatggatattaattttcaaaggggatctacctaagaaagttactgttagaacattgtttaacattcatggttcttctgttagaggcaaaagggcagaatagccaatcaaaatcatgtgaataggaatgactggacctattcccaatgaaccaaaagtaaaacacagaaaagtatgaatgcttcccaatatattcatgtgtttgcaaagccttccattcccccgtttctccctctcgtcatcaatgacttttaagtacatcagaaatagaatattagagatgtatatatgggaaggagaggctatggaatttcattaatgatattcttggaggaggacagagaaaggaagtggggaccatctgactttgttgaaaaactttgtacacagtagatatttgctaaatgttggttgatgttgatgatgagaatagtggggtggaactggactgaaccattaccgtttcagcaggagcatttgttatgatcagctcagaaaggaaaagcctaaagggggtggagatattgctatctacttggccagaataaaatctccagaataatagcatcttttttctccaagagacaactttttatacaaggaaatagtctctgcccacaaaggttgggtccttttagacataatcatacctagaaacaagcatatcatctctcttgtcctcctcctacattgaaggattcttttttgcttggatcctgttgacacgtcccacaactaagggtcatcagtctttgtccagtaagcagtgtaatatccagaggctgggaccttcctcggttatcaaggctttccttaagaatggcttcatgtctcatgcctgtaatcccagcattttgggagtccgaggtggggggatcacaaggtcaggagtttaagaccagcctggccaagatggtgaaaccctgtctctactaaaactacaaaaattagccaggcactgtggcaggcgcctgtaatcccagctactctggaggctgaggcaggagaatcgcttgaacccaggtggcagaggttgcagtgagctgagatcaagccactgcactccagcctgggcgaaagagtgagacttcgtctcagcaaaaaaaaaaaaaaaaaaaaaaggcttcatgtattatttctctatcaggactttactgtaagatgatgtaatacctggccaggcacagtggctcatgcctgtaatcccagtactttgggaagcccaggcgggtggatcacttgaggtcaggagtttgagaccagcctgaccaacatggtgaaaccctgtttccactaaaaatacaaaaattagctggatgtggtggtgcacgcctgtaattccagctactcgggaggctgaggcatgagaattgcttgaacatggcaggcagaggttgcagtgagatcgcgccactgcactccagcctgggcaacagagcaagactgtctcaaaaaaaaaaaaaaaagagaaaaaaaaagaagacgatgtaatatcctcatccattctaatcgtagagtaaaatgagagaagtttgctataaatattggcccatttctgcaagatagtgaagtaaattggttaaaagcagactctggagtcagattgtctgggttcaagtcacagcttgagctgctgtgagctgtatgaccctgtgtgaatcactcagcctctcagactcccactttcctcacttgtaaaatagagataataatacaacttacctcatagagttgtgagaattaactgaattagtatgtgtaaagcacttaagatagagccaagcacacagtaagcactaggaaagtgttttccattattatctatggaatagcacaaagccatatttacagaaaagaaaaataattacttaaaagtattttttaatcgtcttgttatttatagctataatgtcccgatcaacacatttaatctgaagattcttgagggatttttagtgtaagcatctttaggataaaggcttcaaggctttactggataaatgactttagaatattgcccaaaatccttcaatttcataaagcctgtgtcctgccttcttccccagcttcatcacctactacggccccaccctctatagacacaagccaaactgacctcctttcagatgctttctcacaccgtttccccatccatattaaggcctgtgtaacatgctgttgcctctacatggtacattcttgcccctcctttgccttgttaactcctacttcaccctcacgtgtcatcacagatccttctaaaggcagctttcgctgatttccctgacctcttcaaatctccctcttctacatgctcataaggccaggcaaatatcctttgtggcacttcacaccctagaattttacatataattgtgtttgcctctttcctccacaccattaaaagatgtccatgtctgatttgtttcactactgtatctcagtacgtagcataatgactggcacattagaaggcattcaaggccgggcgcggtggctcatgcctgtaatcccagcactttgggaggccgaggcaggcggatcacaaggtcaggagatcgagaccatcctggctcacacgggatgtgagctaatacaaaaaattagccaggcatggtggtgggtgcctgtagtcccagctactcgggaggctgaggcaggagaatggcatgaacccaggaggtggagtttgcagtgaaccgagattgcgccactgcactccagcctggcattcaaactttttttaaattaataaaccacatcttttatttttatttttatttagtgagtgtctcgctctgtcacccaggctggagggcagtggtgcaatcttgtctcattgcaatctccgcctcccaggttcaagcgattctccagcctcagcatcccaagtaagtgggattcaggcgcgtgccaccatgcctggctaattttgtatatttagtagagatgggatttcaccatgttggccaggctgggcttgaactcttggcctcaagtgatccacttacctcggcctcccaaagtgctgggattccaggtgtaagccactgcacccggccaataagccatatcttttatacaaaaaattgtatagatcttgcctccaatgtaccatcgctgtgaagacaagattaattttctaacctaaacacaaactgggttaaaaactagccaaatagtagtaacagaaataataataaaataaacatttattgattacttagtatgtgtcaggctatgcaaaagctttgcattatttaattctcacaaggacactatgagcacacactagtattcctgttttacaagtgagttaactaaggtttagagggattaagtatcctgctcagggtcatactaaaaagtggcagaggcaggagtgaaaccaaagtgtttaattccagggcctgtgctcttaacttttgtgactttctgacttgggcagcttcccagtgatactcaggcctagactgggtgtgtcccaaaaagcaggagataggatttgtggtgggagacaggtgtgaggggaaggagagagcagagaggtggggcatttactgagcacattgtttttatcttgtgaacttagtaaaaccagtgttaatgtggcttcttatatagagctttgcataatactgatcttttaaaagatactgggtttatggtgccagttctattttattttgtgggtaaagttttggccatgaaatgatttgagcatcagcaacaccctagagaaattaagtttgtcattggaaagaattagatcactgtgtctcaaacagctgtgagttaaaagcgaaacagatgcttttgtttaaaaagtagggatctattaactgacagaaagaaatggaagagaactaacagttattgagcccctgccattgctcttttaacaatgagcgaacaagtgtaggatctggctcaataaatagaacaaaaccatataatccaaagctgccttttgcaataagagctaatttggagccttgtgggttttcataagtggaagagtgtatgtctgaatcaagctcccaattttccattaagatcttcaactctgagacaatatattatgctcctctataaccatatggtgatgtcactattttgctactatgaaattcttaataaataatggcctaattacagatgtaattaatttcatactgtgaatgttttctcaaaacattgtaggtaaatgtattttaagaaagtgaactgtactttaaatccactaagagaaatagttctttaaaggaatccctgaggattctcttaaataagagaatctttagtaatgtatatgtctgcaaactaatttttgtttttttcaaatatggacttttgtgtattgagttttttaaagtaagattcatctcttttaaggatggttgttttaaaaaatcaaaatatccttgtttttagcagagtttttgattatatcaattattcttacagtaaaagttagagtttattcgttgaatgacgacttgaagccagccaaaagagaaactgtcttaactttcatagtaagtattttatttatttaaataatactttaattcatttttcaggacaagaatctcatttcataaccctgtcctcacactacactaaatcattcaatgttccataaatggttattgaacatctgcaatgagtatagaatcatagatctatacctctgtaatacacgtatgtgaaaggctcatacaaattaaatttcaataacttgaaggattttgagctaaaccatttaagtacaatcttgctgatttattttttaaagaacacccactggccgggcgtggtggctcacacctgtaatcccagcactttgggaggccgaggcaggtggatcacgaggtcaggagatcgagactaacctggccaacatagtgaaacctcatctctactaaaatacaaaaaattagctggtgcagtggcaggcgcctgtagtcccagctactcgggaggctgaggtgggggaattgcttgaacccgggaggcagagcttgcagtgagccgagattgtgccactgcactccagcctggtgacagtgtgagactccatctcaaaaaagaaaatctaaaaaaaaaaaaaaaaccaaaaaacaaaaaaccacccaccaatcactaagaattgactgaatacccatttaactataagatatacataatggatatatctattatgtatttattatgtgcaaaagaactatatttaatggtacttactcttaaggaacttagagtttaataactattatactaacacaaaaaatcttgctaaatcatgagttaaagattggcagtaattcaccatttatcagacatgacatatgtaacagacgctgtgcattgaactcccatgatctcatctaatttgtgtcacataccccaaacacttttgtgaggaaataaaataatacaactagttataactgctcagttattaacagtaggtatactactaatggtccttcaatataggctgcagcacttttgctgctactcaaaaaaaaaaccaaaaaataaaaataaaaacttatcagaatgcaggtgcaaaagcatagatactacagaacaaaaccatactaaaatataaaacaaataaattatacagtaggacaaataccatgagctcagagggaagaccaatgagaggtgagagtgggggtgatacacatccttctctggaacggagtagttaaagggaaccctgagttgggtgttaatgaaaggaattgacataaattatttaaaaatagtgaagaccatccatgtaagaaacagtgtgagttaagctatgggggcaagaagaaataaaaaaaaatgaagctagtaaataaactgattgactgatagaatgtctgaaagagaactaaggagagcaatgtcagctcaaatgccctttttctatcagggaatgataggggtgtggatgtatgctctttatccaacgtcttcatggttgaacttaagtgatgcagaatcatggcataacctgcagaaaaatgaatgtcagtcatctcttgtaagagctgccccaggaagaaaagattgagaaagctgatcccagagccttaaggagttaatatagaggaagtatcctcaaaatagtacctgagaaagatgatcttagaagaattgtgcacaatggatagtgcgatgaagaagagccataaaaatactcagctacaagtataattcttgttcaaaataggcttctgtaagttttacaattaattacgaaataaaacctctaaaatccaactgtgaatttcagtcatggtaaatggtgctaagattttttgctttgggttttttgttggtttgtttgtttttgtttgtatgtttttgacagggtcttgctctgtcaccaaggctggagtgcagtggtgtgatcatagctcactgtagcctcaaactcctgggctcaagccatcctcccacctcagcttcctgagtagctaggactacaggcacccatcaccacaccctgctaactctttaaacatttttttgtaggctggtcagtgactcatgcctgtaattgtaatcccagcactttgggaggctaaaatgggaggattgcttgagctcaggagattgagaccagcctgggcaacctggagagacctcatctctactaaaaattaaaaaaaaaaaaatagctgggcatggtggcatgtgcctgtggtcctggctacttgggaggctgaggtgggaggattgcttgagcctgtgagttcaaagctgcagtgagctatgatcacaccactgcactccagcctggatcacagagcaagatccctgtctcaaaaaagttttttgtacagataggggcctcacttatgttgcctgctatgtttatgtgttgagttaaggctgaattggacccccatgtgtagtccaaagaaagtcaaaacctcatttcaattatttgctaacccaaacacaaaattaagtttatggggaagctttacgagaactgtcaagtttgtttaaccatttgagagttttaccaagctgaaaaatgcccatactatacatttataaaacatctggctaaaaaatataattcatagaatatttgcttttgaaagctttaaatgaacatatataaaaattagattctggtgtttataaagccaacaaaattcacatttagtttatcaaaaacatcattgtttgtttgtttgtttgtttgttgttgtttttacgtgttgttacacttcatcttttagatgtacaacgagagttgagtctcttcaagataatgaggagagatggggaagattggaaaaagaagaagggaaatggctgaaatgaaccatatttcccttctataacatttaacagatcttcatccttcatatttaatttgaagacatgggtatttgtcttcaaatatttgatctataaatattttgtacatcaaagattgtataatcagttaaattttttaaaatgtagtttctggcctttgagggtgtttgtttttatttacaggatcctgaaggatcagaagttgacatggtagaagaaattgatcatattggaattatctcttttcctgacttcaagattccgtctaatcctaggtatgtaaaaatagttgttaataaaaccacatacggaacttttggtgaagaagcaggtaaccagttaaagggggccacctaatgttaacaaagggtgtcacataggtggatatgcaaaatcttttgaagttctagcaagaacttaagctctgttcttggcaaaaaatttccaatacttctcagccattctttttacatatagaaataaaaattgggaagaggaaaaaatagtacccaggtttttttgtcataaaaaacatcaactcctacccctcaaagtatctaatagattgtcagtttaaaaggctggtgtggtcttgttccttgctctggttgctataaaatagggtcgtctgtagtttttgcctggataaactaccagaaggcaaagtccaagagggaaggagttctcagagctatatctattatttggcctcacatgaaaggatttaagaaaaagtttaaacagggttcaatgtaataaatattcaatgaacacattcttggtatgtgcaaatcacaataagagggagagatacaaaataaataatccacagtccctgctttcaagaaatttgtaataggccaggtgcggtggctcatgcctgtaatcccaacgctttgggaggccaatgtcggtggatcacctgaggtcaggaatttgagaccagcctggccaacatggtgaaaccccgtctctatcaaaaatacaaaaaaagccaggcgtggtggcaggcacctgtaatcccagctactcgggaggctgaggcaggagaatcgcttgaatctgggaggtgagggttaaagtgagccaagatcatgccactgcactccatgttgggcaacaggagcaaaactccaactaagatagaaagaagaaggaaggaaggaaggaaggaaagaaagagggaggggagggaggaaggaaggagggaagaaaagaaagaaagaaatttataatagagcagaatgaataagacaagtgcatctatacatggctgcactagaattttagaacaacatctttttatggtcatttttcctctgccctcagttaattcgctgactgaaatttttctaaaaatttaaattgaatttggaggttttaaataacttggataatttaaaaattgtgtacattcttgaaaatactacatgttccatagtgcagaattaaacctattattttattactgctatcatttctccaacttcatcttgtgccacttgccccatggcaaattatgtgctagccatggtctggcatgtccagtgctttcctacctccgtgcctttgcacatgtcatcccctctacttggaatgggcttcacctggctcttcataagcctggcttcttttcattgttatgacccagagtagaagctactacaaaaaggctattcctggatgcatgatgtaatgtaatctcttgctttgttttactccctatctcagcatcttgtttattttcttcatgacacttatctcaatgtcataatcatttctttacttgcttgctggcatttttattccccactagcttataaactctttaaggtgggccttgtctgtattgcacaccagcagttcaacataataggcccttgataaatattcattgaattgatgatgatggtaataatcattattataatactattaacatttgtggacttcatagccaatctgcaaggtaggctcagtatatatatgtgtgtgtgtgtgtatatatatgtgtgtatacacacatatatacatacatacacacacacacacacacacacacacccatagtttttttgaaacagagtctcactctgtcacccaggctggagtgcagtggtgtgatctcagctcaccacagccttgatctcgcgggctcaagcaattctcccacctcagcctcctaagtagctgggactacaagcatgcaccaccacaccagactaatttttgtatttttttgtagagatggggtttcatcatgttgcctgggctggtctcgaactcctgggctcaagcgatcctcctgccttggcctcccaaagtgctgggattataggcatgagccactatacctggcctagtatatgtttttgaataaaggttattaattaaagccaggtcattttcatcttttaaaaaccatgctttgtttccaaccataaattcatttttgtgaggtgtaaattttatcatctgtataagcttgtcttgtattatatgtttctagagacgttattatggattttgtactgtattttggattttagtattatgttagcataattaggctccaagattaaataaattctcagaaataataagttcttcaaatcaaaactaatgactgtattaagataaaataccaggaaaaataatacaatatatgaaaaactggttactaaacaatatctattatctattatcctaaaaatgctcaattatttattgcttaaaaatcagtcacaaataaaatatattacttaggttttatatatctttgtgtattcttccctctttaaaacaggaatttattagatctcctctgagtgaattaaaaacatttgatgacatctataattttaaatattttgcttccacagatatggtatgtggacgatcaaggctaaatataaagaggacttttcaacaactggaaccgcatattttgaagttaaagaatatggtaatttctgacaagtaaaagtttttctttgctttttgttttttgtttttgagatggagtctcgctctgttgcccaggctggagtgcagtggcacgatctcagctcactgcaacctccgcctcctgggttcaagcaattctctgcctcagcatcccaagtagctgggattacaggcaccaaccaccatagccggctaatttttgtatttttagtagagacagggtgtcaccatcttggccaggctggtcttgaactcctgacctcgtgatccacccacctcggcctcccaaagtgctgggattacaggcatgagccaccgcacccagccaattaaaagtttttctataaaaagttagtgttttgcaataattctttttaataatgtagttaatgcaaaattattcccagatgaagatgaggcagcctgtacgtatggctagaagtactggctagaggttggagggaggagtagtagttgaatgcctagattctagttccagcatgcctttaaccctgatcaagcagaacaacctctgtgtacttgtgttccccatcagagagctggaagagatctagtcccctgaagagcttgactagtaaagatcctttctagaattgtgattattattaggagaaacttaaatagtcatagatgaggtgagtggaacccagtaaaaccaataaatgatttacttgagtcttaaaaccaattagtgacaaaacaaaaacaacaattaggtttccttacccctagtccaacactattttctggctcctaaattcctaatatattcatttgaatatttaagatattcttattttgaaataaattatattaatagactaacaagtaacgtaaatagtttaatctttcatttcttatagtagtttactagcatttctgtgtgctctgctatcaaatttaactttcttctgcttgaagccattttttattccctcaagagattcataatgacatggagaagaataaatactgacacaaattttaacaattaacaagaaaaacagtgacaaaacaaattcgttatgatgaaactcaaccttaaagattacaggctctctgtaacatataatcctaacccatctcccttcttctaagtgtttttgtattttctctgtatatctagaatccacccacctcttactgtctgtagccactctcatcaattcatcagcactctccctcctggactacagcaaaagcctcctaactgatgtctctgcttccaagctatcttgcttggtattagccaaaataatcttgaaatgcaaatttcattatgttatgtcacaattgaaaagtttttttgttttcaaggaacctatactctaatggaagaaataacctattgcctataataaatgctgtaatcaaaatataggcaaagtgcttctggattgacctctgattgttggagtgggaaggttctgcagagattgttgttggtgatgacgatgatgacgatgatgattatgataataaagtggatgttgtgttgatgttacagcttgtccaactataccagaaagtctagctgtttgctaggctttaaagtctgctctaatcaaaatggtaatattacctgtttgtttttattttcagtcttgccacatttttctgtctcaatcgagccagaatataatttcattggttacaagaactttaagaattttgaaattactataaaagcaaggtaagaacatttgtttttttgttgtttttatttttatttttcaaattaactcaactctggttgatgatagttgcccaaagtgagatctgtgatttattatcaaagtgtgccatgatttggggactaattgataaaggagacatcatgctggtagttcatttgcttattctgattttagctgattctgagtttagctttgttggctattcaacagcaaaaacaaagaaaagtgccaaagatctaagtttggtgtatgtgtttagaaactagggtaacttagaatattgggactgagatatgaaggattcacttcctatctttttttaatgatttaatcagccagctaatgctgcgtaactacttcaaaacccagtgccttgaaactcccacatttatgagtcagctgggaagttctgctgatctgggccaggctggtgtcagctgggctcacccatgtagctgcagccagttggtaggtcagctgggggctggctggtctaggaaggtcctgtccatatgtctggcagttggatggggctaaaagtgtgtgtgcctctcatcatccagcaggctagcttgtagcagcagcaacactcaaagaggcaatggaagcatgaaagtccccctgagcctaggcttggtgctggcacaccatcacttccacacattcttttgtccaaagcaagttacaaggtcagcccagaggaaatagacccctcccacactttgtggacacaaggaactgtgcaaaggtcgttgatacatggggaggtagagaattgggggttagttttgcaagcaacctatcacaaaagcttaggtcattttaaaattacaatataatgtagttataccaatctatataactatatgtgtggggtactcttctaagtactcagcatatattagcacatttaatctttacaacaactctatgcgttgatattgttactattcccatgttacaagtggaaaaactgaggtacataaatgtttaataatttgctcaaaatcatacagctagtaagttgcacagcctgtctgcttccagagtccatgcctcaaacattaccctatgctagctctcttattagcattgatttgaaaaatagagtgtttattacttggtctaaaccagcataaaaggctcacttgagagaaaattatagaaactgacctcctataatggggactatttattcaaaccataaataaggaaagttagctcttgctatagtattatttgctgggtagaaagtttactttattcttactttaattctaaactaaaaagggaaacatgcagtttaaattttttatgaatagatctcatataacagtgagattggacacgtaccttttaaaaacataaaagaaaacagagagtagctgatatcaaaattatcaaggaagtaatttggcatataggagagggccctgattctaagtcttgtgatctccccaagatcaatttttttcatctagcacatagctttattaatgtggctttatgaggatgaaatgtaatagtgcatgaaggacactttatttattattattatactttaagttctagggtacatgtacacaacgtgcaggtttgttacataggtatacatgtgccatgttggtttgctgcacctattaactcatcatacattaggtatttctcctaatgctatccctccccgtcccccaccccatgacaggccccagagtgtgatgttccccgcactgtgtccaagtgttttcattgttcagttcccacctgtgagtgagaacatgcggcatttggttttctgtccttgtggtagttcactcagaatgatggtttccagcttcatccatgtccctgcaaaggacatgaactcatccttttttatgcctgcatagtattccatggtgtatatgtgccacattttcttaatccagtctatcattgatgggcatttaggtgggttccaagtctttgctagtgtgaatagtgctgcagtaaacatacgtgtgcatgtgtctttatagcagcatgatttataatcctttgggtatatacgcagtaatggaatcactgggtcaaattgtatttctagttctagatccttaaggaattgccacactgtcttccacaatggttgaactagtttacactcccaccaacagtgtaaaagcgttcctatttctccacatcctctccagcatctgttgtttcctgactttttaatgattgccattctaactggtgtgagatggtatctcattgtggttttgatttgcatttctctgatgaccagtgatgatgagcattttttcatgtgtctgttagctgcataaatgtcttcttttgagaagtatctgttcatatcctttgcccactttttgatggggttgtttgtttttttcttgtaaatttgtttaagttctttgtagattctggatattagccctttgtcagatgggtagattgcaaaaattttctccattctgtgggctgcctgttcactctgatggtagtttcttttactgtgcagaagctctttagtttaattagatcccatttgtcaattttggcttttgttgccattgcttttggtgttttagtcatgaaatccttgcccatgcctatgtcctgaatggtattgcctaggttttcttctagcgtttttatggttttaggtctaccatgtaagtctttaatccatcttgaattaatttttgtataagatataaggaagggatccagtttcagctttctatatatggctagccagttttcccatcaccatttattaaattgggaatcctttccccatttcttgtttttgtcaggtttgtcaaagatcagatggttgtagatgtgtggtgttatttctgaggcctctgttctgttccattggtctatatatctgttttggtaccagtaccatgctgttttggttactgtagccttgtagtatagtttgaagtcaggtagcatgatgcctccagctttgttctttttgcttaggatgaaagacactttaaagtgcctcaagtgctttacgtaatttcaaattgttacattttatctgaatcctgttattgtaaccatgttagtaaaacagttttatgctattgtctgacagatatttttataataaagtagtcactgaggctgacgtttatatcacatttggaataagagaagacttaaaagatgatcaaaaagaaatgatgcaaacagcaatgcaaaacacaatggtaagatgttaagacacagtcactcacacctacagatgcatccagaggtgagagatgagaagttacttaaaaaccatctagtccaatcccccattttagataggttgaaacttaaaatcctccattggcttccctttgcctttagggtaaagttcattttccttggcatcagcctcccttaccagctgatctcatgccctttcctccctccctcccctttgtattaatcactccaatttctctaactgaccaaagtctctcttgcctccaggtctttacaatatcatttattctgcttgaaaatgctctttcccattgtcacctcctgccccttctttgcctggctaattccttctcattctttaagtttcaacattgacagcctttctctgggaagcctcccctgactcttctacactaggttagctgccccggctgtatagcctcttttcttaacacattcttcacatttcattgcagcggttctcaactaggggtgattttttattcccaaggagacatttggcaatgtccagagacatttgtggttgctactggtgtttactagggagaggccggggatgctgctaaattcctaccatgcacagggcaggcccctacaacaaagaattatcctgttcaaaatgtcaataatgctgaggggttgagaaacccttctttactggaatggcttgtttacttatctatcattttcaatattaaactatttgtgagtctgaatcatttcccttatatgcccagagacagcatagtttcttgcaaggaaatattcatgaagttatttgtccatagtttagggctaatgattgctggaactgagattagggcgctggttccctttcccttattcagcattctttacattataccacagatgatatgagttcatgtcatttttgctcactttttcgtattcatttggtttgcatcatcaatcatttatcctctacaatcttattaattcaagatgtaaattaaatgcatttttaaaatgcaaaattctatgctagacactgggatgtaaagctaaataagacaaaaatgcctgccctcaagtcgctcaattttataagaaaaaataaggcaaagtttattttactgttgtgttaataattaaataatataatatgacttaaccccacatccctttactcattgtgtgttttaaaattagtatttaaatttgtaagcagtgaagtacaaattaaatattataaaaaccaacaaactctcagttaagggcggaagtacgctgagaggcctataaagatgaatgatgacgcaggaattggaagaagtcgtgtttgtcagctattaccaaaaagacctgttggaccatgtgatgttcaagacccttctacttctataattctatacaaataattagaaaataacatcctgggcttaatcgtggactcggttatctactttacttttgacactaaaccattcttctgacatttaccttcaatttagaggttagtaaaagcagattttattaatttttccttataagttcttctccgaaataactcctcctttttctccttttaaaaagttgataaatggaattgctcaagtcacatttgattctgaaacagcagtcaaagaactgtcatactacagtttagaagatttaaacaacaagtacctttatattgctgtaacagtcatagagtctacaggtaagtgtgtgtgtgtgtgtgtgtgtgtgtgtgtatactttcttttgaaaaatatttagacagaatattaaagatataaataatttccaatttctataattatttcacattgtattttctttcatagttaaatataattataagaagtagacttttatatagttataaaaaggcagtagggctctgcttctttttagtcattggacaagccattgggtccctattacctccacttctactgcaaaaatgggaaaacagtacccaattcatgtccaaagtagttctgcaggctctctgccttgaccatttggcaccctagtgtcctcacgtggtgaaaatcaaaaccaaaataagattatgtgtgtaaaactatttgataaagtactatacaaataaaagttattactattatcattattatagtctacataatgatggagtcaaactgaatgtttcctaaagcctaaagttttcaacattattttaatgtttcttctttttattttttcctcaacttattttaaataagttcagtttaagcagtatctatgagatatttaaagtattgccaaacagacaggcttgcaaacattaatgatgtatgatgccagcactaaagtggcttacaaattagcatcaggtataagacaggtgaagaaagaactgttgcaagaaagaattccatatgagctctaagcaaaatattaatgcaataggattcagaggaaggtgagcttctagatgattgttgagcaagcaagaacagtgttgtgaagatgatcagtcttgaaaaataattagggttttgaggcagagttgctagacagggtgaaatagaaaccctccagagagagggcagatgaagaagagtagatggtgaagcttaatctttgaggacagcagatcatccagtttggctaaaatataggatatgtatagaatgtattagagatgtaatattggaaaggagtttgggaatattaaagcttcaaatgttattcttaatagtttaacttaatctttacctggaggataacattattgggctcttgccagttgtctggtcatgtccccttccctccccctcccccctcccgctcccctccctcccctccccctcccctccccctcccctccccctcccccctcccgctcccctcccctccccctcccctccccctcccccctcccactcccccctccccctcccccctcccctcccctccctccctcccctcccgagtcttgctctgttgcccagactggagtgcagtggtacagtctcagctcaatgcaacctccgcctcctgggttcaagcaattctcctgcctcagcctcccgagtagctgagattacaggcatataccaccatgcctggcactttttttgttttcgttttttagttttagtagggatgaggtttcaccatgttggcccggctggtctcgaactccctttcagggttctttctatatcaagctccctttttctgatttctctctatgtatctatgctctgtgaacaccaacccccatcccccacctccacttctgtaaggctcagtttctggcctgacccttccctctctcctcaatcccttgaatacagtcaactgaaactcaggccactgatgaaaagtggtgtcccttcctggcatccttcctcagtccagtcctgtagctctacttctccaagggcttctctacatacgagcttgtgcataaggccttggaaactcctgaggtctaaactcttctctgctgtgcccctctgaagcaagacctatgtcctacttactactggtaaatgaatgaatgcaagaatggagtgagtgaatgaataagtctgtggagacatatagagatgaaatggatatccatacagatcatgatactcctaaaaactgtcaacatgatgcttgccatttccttaggtggattttctgaagaggcagaaatacctggcatcaaatatgtcctctctccctacaaactgaatttggttgctactcctcttttcctgaagcctgggattccatatcccatcaaggtagattgggtgagggggtagacgttgctacatatgatcatcttgttctgttcatggaaaacatgtgggtggcaaacagggtaagaatgttgccatgaagtcacagagggagcttattctgtgaaacctgcccctcctggtggacacagacagggatgggaaattgaaggtcagctgcagccttggcaatgacttcaaaagtgagggcaagatagccttgtattaggcatccctaaataagcattaaattacatgtaataaataagcattaaattatatgtaaataaaatctcataagactctagttcaaaaatacaaacatttaaaattatttggtggcaaattcttaaaaagccttaagatggagatatcattccttgaaaatagactcctttctctcactatgtttttgcctccagtgtgtctcatttgtttccctctgtctctgtgttgtctttgtgcataactctgttcaatctctcgtctctgtattgctctctgttcttttcatttttgcttctttccgtccctgaatctctttttttctgtcttttttgcttactcctctgcattcatttttctctctttcaccttcttttcctcctctaaatgctgacagtatagaattgaaacattcatgtggtttttagatttttatctatcattatatattttattacaaataatatattttattatgttgattaaatggaaatgtttattccctgcccttaatttagaaatccagagcaaaatttttttttgttctttgaaaatgtgttactttttaaaatcaacttaagtacaatcaaaatgtgttatttattatttactgtgggtcatgggcttttaagaaaaaaaaggatttaccaagcccaaagcaaggtttggacatgcttgtaggttcttacatatatatactatatatagaaaataatatataacaaagtatcatataatgcatatacagtaatatataatatatatactaaaatatgtaaatatagcaatattatatagaacataagcttaaaatatgtttatataaaagtaaaataacaaactatatctgtgtggaattgtgtgtgtatatatatatatatatggcagtgagaggtagatgttaaaggaaaaaaggtgtatctatttttgtttctcatattcaagggacttattcccagaagcgattgcctcattttctcctttatccagtcctaaaccaatcaaagaaatacagaagttagatagcagaagaccttatcacacctactccttgactgacttaatagaatgatatttatgttttgagtttgcttgatttatgggagaatctattcaagaatgatttaactaaatagaattaaatctttctataagctgagaatacacttctctttactaaattaaacataagtaaaccaggtgtggtggagcatgcctaaatagttccagctacttgggaggctgaggtgggaggatggcttgaggccaatagttcaaggttgcagtgcgctatgattgtgcctgtgaatagccactgcactccaacctgggcaacgtagtaagtctctgtctcagaaaaaaaattttcagaaaaaaatacataaataatttatactttggtggggaggaaggaaaattatttcagaattgtgctttaaaataagtgatgagctgttgaaatagatttggattgttttgacaaacaggtgcaggttaaagattcgcttgaccagttggtaggaggagtcccagtaacactgaatgcacaaacaattgatgtaaaccaagagacatctgacttggatccaagcaaaagtgtaacacgtgttgatgatggagtagcttcctttgtgcttaatctcccatctggagtgacggtgctggagtttaatgtgagctgaattctcctgttgtattttctaggacaatgtgtactcttgaccatgtgttttggctagtgtgcagaacagatgcggcagattttacacatgagtccagtgaacagttccataattttgcatccaagacaaattagtcccagagacaatctgctaatccattgaatggtccttgaggaagataaatgtatcaattttttatttgggagttaattgttttatcttacaccgttaagaccatatcagactctagaagcttcagaataggtatagcagtgcacatgagtgttaggaatatcctctcttcccccctcacttttaatcccctgaagggccacaaaagggtcaaaaatatggaagcctcccttttttctaactacagaaaccattctactttagagcccacttaatagtcttctctcgcagcaaatattatttaagttcccaatctcaaataaaatatgagcaataacatagtaacatagttacaaagtaacttagtaacataataacataggccaatgactgcagcatgcatatgctcactgtcatctattgagcacttactaaatgctaggcatcatgctgagagctttatgaagaatacatgaaacaccatttaattagcaagatgagttagaatattatctttgccattgtgtggctcaggaaatggaggcttctaacctctcttttgattaactaattttatccagagttaataagtggtggtactggtatgtgaaccagtgtgtacctgactccagagcatgagctaataacacttctgctgtctgagggtagatattgctgccatgatatcatttcttctccacctcatatttataagcacccatctgtgcctctacttcacaatgaaactgggccagatagtctctgagatgttcgttcatagctcctgtccccaagagttagtgctacctccccactacttcccttctcctacccccatttcctaaatgcttaggcatctctctgtaatcatcccatgcgaggagaagtcccaacttaccatgacatttcaggaagaccaccaataattattcctggagcatctttctctcttcatttcagacttttccgccatagcccataatcccatcattcttgtctgtagtctttgtaaagttgcttgacaccacagctgtataaacactgaagtaatggagggttttttcccctttagcatttgttattgtgaaatttagaaatttataaagcaaggaaaataatttgaaaggtatgttttacagaaagcattacatcacagtatacatgtctttttgaaatttctcttttcaggtcaaaactgatgctccagatcttccagaagaaaatcaggccagggaaggttaccgagcaatagcatactcatctctcagccaaagttacctttatattgattggactgataaccataaggctttgctagtgggagaacatctgaatattattgttacccccaaaagcccatatattgacaaaataactcactataattacttggtaagtacataatgatggatttacatcttattcccccacctggaacattttcctttgcctctagagaggcattagaattatcctttatacttttattcccaaagcactttcaagagcatcatctaacttgaacatcagtttctcaaaaaacctttgaaatagggcatgattttcatgaccatttcacagatgaggaaactgagggacagagaagttaaaagacttatgatggttactcagctgggaagaggaaaattttgatttgagctgaggactctgactcctgttctaataacactttttaccaaagagagcctagttattccaaagcgagaacctgattaaatcatgttgcctctgttctctttcatggccaaagattatatgcctagacccagttcggataagtgaattttattgtcaaaaaatggggaagcaaaatcctctcctgagaattgaatcctatcttgcctgttccaattccgtagctgagcaacatccctattgcatcatttatattaaacagaggtggatcgatgaagcctgttggtgaaaccaagaaaaaaacttacagaaaatattaagagcttcctgacaatcaccaaataaatggaatgaattatttcgacagccaggccaagtacatgctgttggcttttcaacatttttgaggaagaaattgaaaaaacagtaatgaggaccatagataaatattgactgataaagggaaactgtttatggactagataccaaatccatgtatgcagttctggtctctaaggacaatttaagggacctctgagggcattttggcttcacgtgattttttttttttaatcttaaaccttcaatttagaatctaaaccctggctttaaatccccaaataagatgcactccacttattcatctatttttttttaatcggtgaaacaaaaggggttttagtgacagtgtgatgactttgaacagtttttgggttcaaattttagctctctaatttactagttgtgtgattttgaattaaaatcagtatgacttttagtttctgagcctcagtttcttaaatgaggagaataatattcctcttattgatgtattgtgagaatgaaaggagttaaatacatgttaaagttcctggcacatagtaggcccataaacgttaactcactctttcttccttccttccttccttccttccttccttccttccttccttccttccttccttcctttccttccttccttccttctttctttctttcttttctttctttctttccctccctccctcccttctttccttccttccttccttctttctttctttccctccctccctccctcccttctttcttgccttccttccttccttccttccttccttccttccttcctttctttttggtggagtctcactctgtcccccaagctggagtgcagtggcatgatttcgactcactgcaacctctgcctcccaagttcaagcaattctcctgcctcagccttccgagtagctgggattacatatgcccaccacagtgcccggctaatttttttatttttagtagagccagggtttcaccatgttggccaggcaggtctcaaactcctgacctcaggtgatctgcctgccttggcctcccaaacttctgggattacaggtgtgagccaccgtgcccagccaaaattggtatgtctttttttttttttttttttttttttgagacagagtcttgctctgttgcacaggctggagtgcagtggcatgatctcagctcactgcaaacttcacctctcgggctccagtaattctcatgcctcagcctcccgagtaggtgtgattacagtcatgcaccaccatgcctggctaacttttgtatttttagtagagatggtgtttcactatgttggccaggctggtcttgaactcctggcctcaagtgatcggcccacctcggcctcccaaagtgctaggattacaggtgtgagccactgtgcccagcctaactttatttttctttaacataatttctgctccagctccaggctgcatcctaaagcacaggttttgtttttgtttgtttattttttacttattgttgctgctgctgtttatttttagattttatccaagggcaaaattatccactttggcacgagggagaaattttcagatgcatcttatcaaagtataaacattccagtaacacagaacatggttccttcatcccgacttctggtctattacatcgtcacaggagaacagacagcagaattagtgtctgattcagtctggttaaatattgaagaaaaatgtggcaaccagctccaggtaagccacaaattataagtcacaattgaattttcttttcaatgaaggaggctgccaaagttttagctgcttctgaaaagtcttgtctcatacaaatgatcttttcttttctttttcaaatgaacttttaggttcatctgtctcctgatgcagatgcatattctccaggccaaactgtgtctcttaatatggcaactggaatggattcctgggtggcattagcagcagtggacagtgctgtgtatggagtccaaagaggagccaaaaagcccttggaaagagttaagtaatgcatgtctcgctgcagtgttgcatgaagtgtggccaccaggctaggatatggaggaagaactaagggaagactaggcctgcttttctgtaatctactcaacatactcatttttaggaaggtaaaccatcctcctgtcagctcccaaagcacaggtcaatcctcttttgtttttcaaatgtaaatgtaagcactttaagaatatatgatcatggtagcaattacattcatggaggaaaaattactatcagaatactttggaggtttagggtagggtgttgatggcagttatagtagctagtagcagcacaggaaagacctgtataggtaacatttggattttttttaaattctcattgaaatccatagcacagaagaatctcaaaatcattcaattctcataagttcctatttatcttattatgttcagctattattttcgaggcttgaatgtctttgaacaaggaaggaaggactgagaaactgtaaaattaaaaaatactcggagaacgaataagcctgtccaaacaagtcttcagccatttagaacctagggacctccccaccaaaatgcacaaagttgtgcttttaaagcaacttaaaattaatttctatgttaattcagtccttcatgcattcatacctatttatttatttatttggaacattatattgattgcagcattcattctatgtacaaaacactatatatcagtttctaagaaactcctcatcaaagctatttgtttaagacttagttcttgatttaactttgaatagttatgtatttataaatacaaaaggacaaacttagaaacaaagttgggaaattttgtctttgatcatttgaaaaatatcatctgtgtatttcactggtttgtgataaccatgtaacaattagtaccttttagatctttagaggaatgatttatacatctcaatgtgctcaacattttgcctttctggacaggtatttcaattcttagagaagagtgatctgggctgtggggcaggtggtggcctcaacaatgccaatgtgttccacctagctggacttaccttcctcactaatgcaaatgcagatgactcccaagaaaatggtaaaatgctcagcatgtttattactgaaaatcccattgatcatttgccccccagatctcatttttatccttcttcccaaatattctgtaccctgatcttagaatgccaagactacataactcacctgtataaaatgtttcactggccttcaagataaagtacaaattctttagtgtagtactcaaaaccttccatgatcttcgccctggctctctccaactagctcttaccctgctgtgccttacgttatgtttaagctctacagaaccaagtggagttcttgagtggcattatgctattttgcacctttgggcctttatttattggaattggtttccccttcattagcctggagaagcaatgtaagaatcatcgcctctacgagacctcttccccacatagaatttataattccctcctcctttaatagggaggctattgcagggactagatctatttacaagttatagaacagcattgtgtcattgtgcattcttacatgtagttgtaagtcctgctcacctactgcatcaggagctctttaaggatagtaaccataccttaatcatcttctttctatggttttaaaattgttcataattatacttgatactgtggtattcatagttatatttgcaataatatagcacaaagagcaaataataaaaatagcatacccaacaaaagcatcactcactctaaatgcttaggtatttctctggaatcagtggatcagagaggctgcaggattcaaaaccaaattcagataaaataagtcaaaagatatgacactagatcatgaactccactaagataaaacaagtcatattaagaagtatggtgcacagttcctaatccaaagcagcccctcaatatttgttaaggaatgacttgtgaaggctctaaatacttaaatagtttcatggaatttttttttgagattttatctcctttttaatccttcttctttatctttttttaaaaaaaccagatgaaccttgtaaagaaattctcaggccaagaagaacgctgcaaaagaagatagaagaaataggtactgtaagattcatgtgattgtaaaaaggttatggtcatatcattcaaaaactggacaaaattaaatgttatataaattcccctaattgaaataaaatgaatgaaaagaaagatatgtatggaggtctagcttatctctctcagaaagattaatccaaataaagtctagtagttcatttgccatagccttaatctaaggaaataggtctttattacttcaagctctaaaatccaaaatattagcttttatttgtcataaatattttctctctgataacttcatctggcaattaaaatcatatccttccattttattctgacaaaatccatgatttgactattttggggatatacctagaagtctattacttctatttcatatatttaactgttagtagcattgttctttggaaaatacatcttgtgagaattattttaaaataattatttaaatggttatgataattcgtcatgttactgtagaaagaatatcaaactgggagtcagcaaattgagttcaactaatatcatgcctatggtaatataatagtttcttccatttgtatatgagttattttaattctaacctttattctaagttctaatgatatgaaaagagagacattgactaatctgagcacttacaatgaaggataatgctactaggtgaagtccacaaaccatgttatataagaagtttttgaaaaataggatattcagcttgaagaaggaaatatttgtatagtgatgatagccatcttcaaatatttgaaggcttcttggatatttaacttattttcttaaaaaacattttctattctttttctatatttttctgcatattttcagcagaacccaaagttccagtttcaagagttagtatttagcttaattgcaggaaaccctttaaccatttagtgtgagctggaatggaccatttggtaaggtcacattctccccattcttagaatagttccaaggggagtctggacagtcaactagccataactattgtgggtagggggatcatatagcaacagaaaccaggtatcccttgagattccttctaagcctgagatgttatcactctgcgtcatcaagagcacttgcattattaccatttcagctgctaaatataaacattcagtagtgaagaaatgttgttacgatggagcctgcgttaataatgatgaaacctgtgagcagcgagctgcacggattagtttagggccaagatgcatcaaagctttcactgaatgttgtgtcgtcgcaagccagctccgtgctaatatctctcataaagacatgcaattgggaaggctacgtaagtatgacattttctatcagaattctgctcaatatggggaattttgtgtaattttatgctgctaagaaaggcagttttcatgatctatttagaattgaaagtagaaaagataacttgtaaatgtccataagaaaaaaaaatccttcatttttgggcatccgaagaggtacagtacagagcagagtacactaggccagagttaagacctggcataaccttaaagccaagtcatcccataaacttgaatgattatttatcctctctgagcctcatgcaaggagcttcgaccagatcctctccaatatgcctgtgagttctacaagtctacgcttttgtgatattacaaccattaaaaattctgtctatatctacattgatgaaataaagcagaatatttctaaatctagcctaaggttaagtgtacttatataaaagctgatgtcttatttcagtttcaaccacaatacatgtttccagaatttatagaactctcattaacatgttttcagaacttttaggactttatatatagtctttttttttttttttttcagtaggaatctggctctgtcacccaggctggagtgcagtggtgcaatcttggcttactgcaacctctgcctctgggttcaagcgattctcctgcctcagcctcctgagtaactgggattaaaggcgcctgccaccacacctggttaatttttgtatttttagtagggacagggtttcaccatattggccaggctggtcttgaactcctgacctcaggtgatccgtccacctcggcctcccaaagtgctgagattacaggcgtgagccactgtgcccagcctatgtatagtctttaacaaaacaagcaaaagcaaaatgacagcttctgttttatacttatgtgtgctgcgtaatgacattttcatcaatgatggaccacatgtgcaacggtgatcctataggattataataccgtattttttctgtacctttcctgtgtttagatatgcttagatacacaaatacttatcattgcattacagttgtctgcagtattctgttcagtaacatgctgtacaggtttgtagcctaggagaaataggctatactatatagtctagatctgtagtaagttataccatctagattagtgtaagtacgctccatgatggttacacaacaaaatcatctaacaacatatttctcagaacatagccctattgttaagcaatatctaataaccataattttggtaaatggccacaaaatttatgtttgtagaaatatattcattgagatgtacagtgtctaagattcagattgttttccaatatttgttttgctttgtttgtttgtttgtttgagagacagagttttgtttttgttgcccaggctggagtgcaatggcgcagtctcagctcactgcaacctccgcctcccgggttcaagcaattctcctgcctcagcctcccaagtagctgggattacatgcacctgccaccatgcctggctaataatatttgcttattataagcagaattttaataaacagtctagtccatatgttgtttttctttttggagggaggatttggcttttttttctcttaattttttttaatttttaaatttatgtgggtaaatagtatttacggggtacacgagatactttgatacaggaatgcaataagtaacaatcatatcatggaaaatggggtatctatcccctgaggtatttctcctttgttttataaacaatccaattatactcttttagttatttttaaatgtacaattaaattattattgactgtagtcaccctgttgtgctgtcaagtactaagtcttattcattctttctattttttgtacccataaaccatccccacatccccctcatcctcctactacccttcccagccttctactctatatctccataagttaaattgttttgatttttagcacccacaaataagtgagaacatgtgaattttgtctttctgtgcctgacttatttcacttaacataatgacctccagttccatccatattgttgcaaatgacaggatctcattcttttcatggctgagtagtactccattgtgtatatgcaccacattttctttatccatttatctgttgatggacatttaggttgcttccaaatcctgactatttttaacagtgcagcaacaaacatgggcgtgcagatatctcttcgatgtactgattttctttcttttgggtatatacccagcagtgggattgccagatcatatggtagctctattctttgttttttaaggaacctccaaactgttctccatagtgtatagtaatttacattccccactaacagtgtacaagagttcccttttctccacatcccctccagcatttgttattgcctgtcttttgaataaaagccattttaactgagatgagatgatatttcattgtagctttgattgcatttctctggtgattactgatgttgagcaccttttcacatgcttttttgccatttgtatgtcttctttagagaaatgtctattcaaatcttttgcccatttttaagtgggattattacattttttcctgtagagttgtttgaactccttatatattcttgttattaatctcttgtcagatgggtagctgcaagtattttctcccattctgtaggttgtctgcttactttattgattcctttgctgtacagaagctctttaacttgatgtgatcccatttgtccattttggctttggttgtctgtgtagtggggtattactcaagaaacttttgcccagaccaatgtcctagagagttttcccagtgttttcctatagcagttttatagttagaggtcttagagttaaatctttaatcaatttttatttgagttttgtatatggcaagagataagggtcacgtttcattcttctgcatgaatgggataaccagttttcccagcaccattaattgaagagactgtccttcctccaatgtatgttcttggcacctttgtcaaaaatgcgttcactataggtgtgtggatttgtctgggttttctattctgttccataggtctatatgtctgcttttatgccactaccatgctgttttgaattatactatagtataatttgaagtcaggtaatgtgattcctccagtttttttctttttgctcgggattgctttggctattctggtcttttgtagttccatatgaattttaggattttttttctatttctgcaaagaatgttattggtgttttcatagagattgcattgaatcagtagattgctttgggtattaaggcgttttaacaatattgattcttccaatccatgaatatggaataactttccatttttttgagtgtcctcttgaatttctttcattggtgttttatagttttcattgtagaaatcttttacttctttggttaatttaattcctaggtatttaattttatttgtggctattgtaaatggtattactttttaaatttctttttcacattgttcattattgacatatagaaatgctactgatttttgtatgttgattttatatcctgcaactttattgaattcatttagcagttctaatagttttttggtggagtcctcaggtttttccaaatatgtgatcatatcatttgcatacaaggataacttgacttcttgctttctagtttggatgacctttatttccttctcttgtctaattgttctggctaggacttccagtgcactaggacttgcctagaaattgcagtccttgtggcctagactgcccctcaagttaacctagggccctagagcactccagcccatggtggggaggcttgctggaactcaagctccaaccactgggatgagcgatgcccctctggctagggccagtccaaatgctccctccatgggcagacaccagctgagtacagcctggttctgctttccaccgtgacagtgcaacactgagttcaatgcaaagccacagaatgactgcactctccctctcccaacacagagattctccatgctgcacagtcactgctaggggatgtgggaggagtggcattggtgcttcaagactatctttcctgccctcttcaatgtctctttcagtgatgtaaagtcaaaaccaggtactgtgattgctcacctgattttcggttctcttgatggtgctttttgtgtgtagttagttgttaaaatttagtgtaccaacaggaaagacaaatggtgtaggcttctattcagccatcttgctctcccctctcatatattttttcgtttttcaatttttcaactataatcatctggcttggcttcagctggatagaagtctctctctgcagccccctccttcctggaactctccctcattccagacaagttggccttgcaaaactcccatcagtgttgccacaagtcttcaaaatcatcaggctctgcttgtattcctctccctgccctagtctgtaaactgcctctaggcagtaagctggggcaattttaggtttcacctaattgtttcctttctcttagagatcacagtcttgcttatgctctaatgtctgaaaactgttattttgcatatcatgttttgttttctattaaggcatcttatatgaaaacagaagttcagtccatttttattaaagtaaatataaacaaattaccaagttaaagaaggcagagaaccatataaagcctccttttttctaatataaacacaattattacaattatatatataagtgcaaataactttatagactgatcgatatcttgtataatctcaggaatactaaacatttagcaatttaagaaaaaaatcattaaagatatttaatgctttgttttgccaatgctattagtggaaaaatcctaaggcctttatagtttgtttgtttgtttgtttgtttgtttgtgacagagtctctctctgttacccaggctggagtgcagtggtgcaatctcggctcactgcaacctctacctcccaggttcaagtgattcttgtgcctcagcctcctgagtagctgggactatagacacccgccaccatgcccagctaatttttgtgtttttagtagagacggggtttcaacatgttggccaggctgatctcgaattcctgacctcaggtgatctgcccacctcggcctcccaaagtgctgggattacaggcatgagccactgcaccctgcctataattctattttggaagcattaaacaaaatgttttatttacctttcagaaaatgcttaagttacagattaatggccatattttaaaattcacctataagtagaatttatattgtttttccataattgaatatgatttttttgtccagacatgaagaccctgttaccagtaagcaagccagaaattcggagttattttccagaaagctggttgtgggaagttcatcttgttcccagaaggtattatacttctttcatgtttccttgaaagaaatgtggataatgcaagtattatggccaaaaatctagaaactacccatttcccaatagcttgcataggagttaagatgatcctgcaatttgatcaaattttgttttgttttgctttgcttttttaaatttttatttttttaatatacatcgtactggtgattggctccaggtcagaatgaagaagggtgctattccatttaattttatttgacttcattatgcatttactacacacaactatgtgcgatacactatattaagccactatttttatcctaaaatatctgtactataaaacaaacattaataaacaggaagaaaagttttctttttaaagttttctattcaacacattttaaggaaacacttcctctataccactgaaaacagtgatgggctgagtcctcgagccatactcttcttagatgggcttaaagcactggttttccaatgagaaggcaaggaatgagttcaaaggcctgcagttgtctcctcacgcatctccttatttctacccttgtcttctctaatccttcttccacacaattgtccatttcatctgacattacccattagctagcatgtcctctagtaaaccttctggccactgctccccacactaccagtgattggattaattgcaccctcaattaaccctgttgtgtgtatcatattgtattataatgacttgtttactttcctgtcttccacattaaaatgtaaatacctcaaaggcatgaactaaattcagattactgttttatatccaggacttggcctaggatactgaaaataaatgtgttgaacgaaagcacactgcctctgaactcttataatgccttattggtacaattattacagtgcagtgtaatttatttacttaactatttcttccactagattgtaaactgcctgagagcaggactgtatcttatcagtgctgtttactcagtactcagcactatacctgatacaaagttggtagacaatagctgtaaataaatatacaagcttaatcataatcagcagtttttagttatgtcaactttgttttgagcagtgctaacatgcatcactttgcttccctattttagaatatactcacaacaaacatctttttctttgtttgtgtgcttggattttgcaatgtttcaaaggcattcttctgaacttgaattctcatcatagaggtgcaatgtctaaaaacatgcaatatataagagagttactgaatatatttttcttgatgaggttttccttaatgatgtgatttcatctcgtgaatttttttctttctctaaagtagtttgaagcaaaaattctgttaatggatgtctctgttaagttgggttaatcaatattccactgtatttgaatatcaacattttaacttccagaaaacagttgcagtttgccctacctgattctctaaccacctgggaaattcaaggcgttggcatttcaaacactggtaagcaggtttaagtgatatatgcatttaaatagtgatttgattagcaagatgtaattctttgttagtatctatttagtttacccaggacttaaatggtagcaatttttaaaaaatattcttttttttatgtattaccaaaagacttggatatacccacatctttgaacatattgatttctcctttcactcctctcttttttttctttttcctttttttgtaaatgaagaaggggtctcgctatgttgtccaagctggtctcaaactcctagtttcaagcaaccttcccacctccaccttccaaagtgctgggattacagcttgagccactgcacccagcctcaagtctttattttccttcacttttctcactgactgggagcttgtgtagagttagaaacaaataaatgaactctcttgggctgatctttatgatgattaagtgcagatgctttccaaatagcttcaggaatggttttgtttgtttgtttgctacttttgttttaaaatcttggtttccacaatcaaaattttatactcattaaacatggagccaataatgaatatctaaaaagatttggtgtgttagttgataaacattctcatgccttaaatagaattaactatttgttgaataaatgaagttttttgttaatactaattattattgaaattaagatcaatgaatagaaaattcaaggacatgagttgagagttcagagaaaaacatgatctaatattattttttccttgaagtaaagcaaatgtgagaaattttaataccaataaaacattataggaatttcctaatatgattctactttgcttccactttgggctgaaggtatatgtgttgctgatactgtcaaggcaaaggtgttcaaagatgtcttcctggaaatgaatataccatattctgttgtacgaggagaacagatccaattgaaaggaactgtttacaactataggacttctgggatgcaggtaagtaggtgttaatatttatgggataaaggaaacattctctggttttctgagaattctattagtggaattaccatacacaaaaaagtagaagttcaactcagttcagcaatagaaaccaaacacttaaaatgagcattgtactatatgtgtagggatgtgaattaaagggatgaaggaaggaggaaggacaagtaggtattcatgtaacttcaattgaaagaataaattgcataagataatccatgtgctgtggaagtccagagaagggtgaattcatctttagttcctttatttgcctatactcagagttccttgatttccttgattctaacaaccctttcctccattttagccattcatactcatcttcactttatagatcttatcatcctctctgaaatcttgatttcagacattcacatctcaccatccagtgacaacctccttcctgtcctcctaactcattaaccagattacttccatagctctgggtcagtagcatcactgaaaccttcagtccattgactcaatcccttttattgtcctttacttccctgctctttttactttactccttgttcagattagaattcaccagccatcattaaaaccacactgactaaaattatgccaactccctggatcctatctcactccaggacacaattccaaccatgattggacccaccatttatcttctctttgccagcacacccctaaagagaattatataataggctgactgatttgatttgaaaatcacagtcacaaaactttgcatgagaattcaatgtgttccaaaattctagctatatttttttaaaacactaactttattcttagagattagaatttcagtggtttcctaaaattttgcttacataccctcttgttttggaaaaactatgtatccctctgacacttttttttttaagacggagtctcgctctgccctctgacacattttaaaattggcatctaaaatttttatcatacattttttaaaagatggcaatctattacttttaaaatatttaaatattggtatcttaaaataaaactgttttatcaaacttatgtatagcagactccaaataccatagcaatcaattttttaaatgctcaaataagcctttttttttcaagatggggtcttgttctattgcccaggctggagtgcagtggtgcgatctccgctcactgcaaactcctcctcccctgttcaagcaattctcatgactcagcctcctgagtagctaggattacaggtacacgccaccatgcttggctaatttttgtatttttagtagagacaggtttcgccatgttggccaggctggtctcgaactcctgacctcaagtgacccacctgcctcagcttcccaaagtactgggattacaagcatgaggaactgctcctgggctcgaataagctcttagcaacagattacatatcattccttttcctcaatgaattcatatttccattttactcccctaatgttacatattttatgcatgaatttttttctgttgatcaccttattatactttaatgaacaaaaatatgcacatacattgaaaatgaaatatcttaaaatttcatgattgtaaaattccaagtatcaaatgatatgtggatttaggtatcattacaaatattattattagtatactattgataaaataacatatttctaaagttattaaatatagaaataaaattttatttaaaaattctcttctcggccaggagcggtggctcaggcctataatctcagcactttgggaggccgaggcgggtggatcacgaggtcaggcgatcgacaccatcctggcaaacacggtgaaaccccatctctactaaaaatacaaaaaagttagccaggcttggtggcaggcgcctgtagtcccagctactcgggagacagaggccggagaatggcgtgaacccgggaggcggagcttgcagtgagccgagattgcgccactacactccagcctgggcgacagagcgacactccgtctcaaaaaaaaaattatcttctcattagataaatgaaatttttctctcaattggcttaatagttatggataaatgttatttattgttagaaatgagagagagtttggcataaattctattcttatttttcatttttatagaggtaggcattgctgttcaacccaattttatcaggaaggttgataaaataaaaatattgtcaattttattacccctttatcaatatattttaatcttatatcttggagcttcacatttagcttattcaatttatgtaatatgtttgtcatataatctaactggaaaaatcagtcctcattgataaaatgatcagcgaaaatcagacttactctttgtcatagaaatgccaatttcatttttcaatccaaatcatgttaagaaatgtcactctttttttcacaattttaattttcagtaaaaatgaacttttccatataaacttgtttcatcaggtaacactaaatatcagagaatgcacacacaaattttacttggccacaggatgtaaatggggaataaacttaagtaatcagaatttaccatactgatggtattatcttttttttttttctttttttgagacagagtcttgctctgtcacccaggctggagtgcaatggcacaatctcggttcactgcagcctccgcttcccaagttcaagtgattctcctgcctcagcctcctgagtagctgggattacaagcatgtgccagctcgcctggctaatttttgcatttttagtagagacagggtttcaccatgtggtccaggctggtctcgaactcctgaccttgtgatctgcccaccttggcctcccaaagtgctgaaattacaggcatgagccactgttcccggccagtattatcttatttttacagaaataaaatcaaaatgttactcatttctcttccttagaatttactcacagggtttgcataaatcctatgaatcatgccaccatcttcagccctgtggaattgccctccctcatttggctccatccccaccaccctaaatacaacgtgaagagttggagaaggaccttgattaagaagctgtaaagttgcctttacattatttcttttaaacccactagcttttctgcagacagaatgcttcatgaatttaagataatcataactcagatagagataccaaaggccatttctccatcaggttcctgtagtggttttcatgtctcaaaatcctgattcaagatgggcttgaggcttggaaactgagatactaagacagtcagaccatctcatcaaaacagactcagcataattttataactcacactgatcttggctaccaaaggattttggtagatgattaaggaggtgtcactcttaaaccatgtaaattgtaatttgagatagacacataaataggtggccataacagatgggtaaggcacagaggccacagccaaactctgctcaactgtaggattgagatcagcaagggctcctctgctcacctagtcttagacatataaaatcggcttgtgtaggtatgtgtgtatatatatatatatatatatatatacacacacatatatatatacatatatacatatatacgtatatatacatatatatacatatatacatatatatacatatacatatatacatatatatatatacgtatatatacatatatacgtatatgtacatatctacatatatacatatatgtacatatctatacatatatacatacatatatatatatatacacacactgcctcagcaatttgtgtttccaccaataatattatcagagacatcctttcatatcagtatatacagatttacttcattactttaatggctgcacagtaattcacatggtgggtatactataatttattgaaccatgtttctattaaagacatttgggttgtttacaggttttcactattataactgattttgcaaagtctgcatttatgcatacatatcttcctacatgtatatttctgtaggatagatgttttgtcttggagtgaactaactgggctaaagggcatggacattttaccttctgataataaatattgccataattatcttccaaaaggattccatcaattgacattcttaccaagtgtatgcaggtagccttgatccctcacattcttataatttgggggaataaacattttttcttttattcatacaatgaacacttatacagaaattgaaatgaatggactagataactacatgcatcattttgattaaagctcaaaaatgtaacattgctgaaaaaagcaaattgcagaataatatgtatacacaatgaatacaactacataatatttaaaaacatgaaagaccgcgctatatattgtttgttaatacacataaaatttttgccaagttgacagacacaagtgatatgtcactgatgtttctatttcactaccctgattactagcaatgttgaacctcatttcatttgtctgtggccatttgtatttcttctttcatgtattctatgatatcctatatactactttaatatcctttcttttgctttccattgagttccttttttctggggtaagttacctagcttcttcttgcttagtttcctcatctgacaaatgggatgataatagtatctatttcatagttgaagattaaatgagctaattcatgtaaatatagtacttggcccatagtgagtactcaacaaatgtacttattattgtttacaggagcactttgtatgttagagctataaattctttattgattataaatgttgctggtatttaatctgctacttgtctttaactttgttattagtgtttttaatttgtatgttataaaatctgtagatcttttcctttatgtcatttgagttttgtgtttttggaaatcttttctcactgcaagttttaaaaacgtttttctacaaaatactgcatgttctcacttataagtgggagctaaacattgagtatatatggacacaaagaagggaacagcagacaccagggcctgcttgagggtggagggtgagagaagggtaaagatcaaaaaatgacctattaggtactatgcttattacctgaatgatgaaagaatctgcacaccaaacctctgcgacacgccatttacctatacaacagacctgcacatgtgccccgaacctaaaataaaatgtttttctaaagaactgttttttctatattttctatagtacttttatagttttttgtgagcatttagatttttttatctgaaataaggatctaatcccaaatagccagatgatccagcagtatttgttaaggaattcatgcttttccaactgatttaaaatgtcatcttgcccccatatatattgaatttccatatatgtggatctatttatagattctctcctctgttttgtttacatcagtatcacactgatttaaagtaccatagatttgtggttatattgtataactattaggcaagtactctctggtattcttatttttcaaacgtttttgatgttgttattcttacacatttactctgccagataaactttggaattagtttgttgaattctccttttaaaattataatagggttttcatattgtcctgaatttatgaattaatataagggaaattgacttgccatattgaatcttttacatctctttatccttttgctttatgaactaaatcaagggtcagcaatttatggaccatgggccaaatctagcctgccatctcttttgtatgtcctttgcaataacacaattatatataacttgacagcattttttttttttttgagacagagtctcgccctgtcgcccaggctggagtgcaatgggaagatctcgggtcactgcaagctccgcctgccaggttcaagcgattctcctgcctcagcctcccaagtagctgggattacaggcacacaccaccatgcccagccaacttgacagcattttaaagtgtcatgcatatcactatactgccatattttatttaatctttaaattttcagtgcatttccatcatatcaaaataagaaacaagtacatctgtgatattttgggcttagttcctgttaattacctttcctcctgagtgtgggttacactttcctatttctttttatctagtaattttggattgaatcttctactttattaataaaaatattataaagactctggattctattacattcctctgaagatttttcgtgtgtgtgtgtgtgttagcaggcagttggctggattcagttccagactctgaaatctcagttcagtatttttagccttagctggatgctagaaatctgtgctgtgcataggtcaagggtcagccaggtttgagcaaggattatacacagaacttggagttccttcactattcagctgtggtaactattccctactttgtcctctagttcctaaaccagtatgatgtcaggttctactggggttttagccactccaaggcaccaatgggacctgccctcagggtaaagctataaaaagcgggacacttattcagtgtcattcccttctcccaagtgtcactttccctcccactctctagtatctgcaggtagtttgttttaatatgtatcttgtctagagtttgtggttatttttacagaaaggttgcccaatataagctatttggctattactgaaaccagaaccacttttttttttatattttctatcagtttcaaaagttccttttagtctcaatttactaagagtttttgtaatgcaattatgctgaattgtattaaatgactcttctatatctatccttccccaccctcccctgctgttctaaggaaatcattggccgcaggtgatccaatagtcttttgctctggcttctcccaccctggtggttgtctcccaagaagatagttaagaaggaaaaggaactttctgttttcaagaaattcctcaaaattagtggttgaatagctggtgctctcttttgtttacctgcttgacttattctggattttatggatttattattttgggtatagttctcaattctatcagttcaccagaatttggagggaagatgaaaaatgtttactatttgagccagaagtcagtgggcactattattattcccattacaaagatgagaaaatggaggattagagagttcatgcaaccagtttccatcaccagttaataagaggaatgccaaaaattgaatccaggtctttctggagccagagtttggttgtaaaatggggtacaaatgggaagttgataaaattagaaaagtaagctggggacataatgggcagggccttgaatgccgatatagggaattttcagtctttgatgaaacccatcatttactgaataccagaggctgagctaaaagatacaaaaatgaataagatgaaaatgaaaaagtacctgagcctaaggctcccactatctgaaacacaaacatgtaaagagacagggtaataagtgctatcacaacagcatgagctctgtacccaatttagtacgtaacagtctaagaaaggtaagatgtttctgagacagtgttgacttttctagacatctgtttgcattgctaaactctacggcaacttgtgtgtctatgttaggaaatctgaaatgaactttcttctgtgccttagaatctaagggattattttaacattgttaaagtggagagtttgtgtccagacaagcataatcaaggtcaacttttttagagataaagtatttcgagtctgggcacggattacagcatcatgcctgtaattccagtactttgggaggctgaggtgggcggatcacctgagatcaggagttcgagatcagcctggccaacatggagaaaccgtgcctctactaaaaatacaaaaattagctgggtgtggtggcgcatgcctgtaatcccagctactcaggaggctgaggcaggagaattgcttgaatccgggaggcggaggttgcagtgagctgagatcatgccgctgcactccagcctgggcgacatagcaagactctgtctcaaaaaaaaaaaatgtattttgatataattcttcacttgtatttcagttctgtgttaaaatgtctgctgtggagggaatctgcacttcggaaagcccagtcattgatcatcagggcacaaagtcctccaaatgtgtgcgccagaaagtagagggctcctccagtcacttggtgacattcactgtgcttcctctggaaattggccttcacaacatcaatttttcactggagacttggtttggaaaagaaatcttagtaaaaacattacgagtggtggtaagaaaaacatgcttcaataacttatgcttaaattattgcaaaagagagacacagaaaggggggggagagaaacaatagtgtaaatttaacgaaacattaagcattaaggaaactggatggaggttattccagattttttttgtactattcttgcaatttttctgtaagtctgaaatcgtgcttaaaaatttttaataaaacaatatttgtttcgtagaaaatataaaatactgaaaaacgacagataaataaaaatcatcaataattcccatacccagagatatctaattttaacaattggtacacgtctttttttggtatacaggtacaattggtacacaggcttttttttccccttaatacattcagaaaatgtgtcttgaaatctatgtgccagacattatgcaaggaactggagataaaacaataaataagacatggcccttgaatttaaagaacttgcagtctagaaaactttccattgtataaacaaataaacagtcccaaaaaagaagaaaagtataatttgttaagtacaatttacccacagtctgttaattgtattcacgctattaacattaatatttttatgtaattttaatatttttatataattttaatattttatataagtatgatttaccaattaaaaataatagtacttttaaaggactaagattcttgctaagggtcatatggccaattaatgacagactggatttcctggctcttcactctctgttttcagctatgaaattcacttcagtaaacatgtaccgacttattttgtgcaaagcacattcccatgcatccttgcactgtggttccatgcagtctctggagcgaggctgctgggccttgaatcttggctccatcacctcctagcagtgtgacagtgttacttgatttccatgtgtgtcagtctcctcatctgtcgaatgggagtaataacagcaccaacctcatagaggtttttagaggttaaatgagttaatacatataaagcacttagaacaattatctggcttataaataacttctttttaagcatttgctctggtcaatatgcaaatagccataaaatcttattgctgcttatatccatgtaagtatttatacatagtttgccttttccaagaaaaataattttttagtttgaaaagtggtccagaaaagttgatccagggaattcaggttatataaacttatgtttttaactgaatgttttctgcctttattttagccagaaggtgtcaaaagggaaagctattctggtgttactttggatcctaggggtatttatggtaggcaaaatgattttttattttatatgttatcttttgctttagaagttaaagtgtgtatgtaacttaaaacactatttttcagaaagtgaattgtctaaaatcagtagtatccacttctggccaggcacagtggctcatgcctgtaatcctagcactttgggaggccgaggtgggtggatcatttgaggtcaggagttcgagaccagcctggccaacatagtgaaaccctacctctactaaaaatacaaaaattagctgggcatggtggtgggcacccatagtcccagctatttgggaagctgaggcaggagaatcgcttgaacctgagaggtggaggttacagtgagctgagatcgtgccactgcactccagcctgggcgacagagcaagactgtgtcaaaaaaaaaaaaaaaaaagtatccacttcttagatcactatctttcttgatagcattatagtacaactactataatctgaatgactgagacacaacaataataattccattaattttgaatgcaaggccttgaaatagtaacaattgcatgacttccctcatatattattcattgtctatccatcacaataataatttataatatattattattgagccaacagtccaaagaacacctaagaaaaagtcatttacataattaacatgcattatttgaaaacataataatgctaattaatcactaaacaaacccattcctcattgctcctgcttccctacttttccttcaattgagatattccaaatcttctcaaagctagaattttgcaaacatttgagtacttaatcaaggcctaaatacatatacatgtatttatgaaatttaggatgtggccagttaaccattctcttttcaactaaagaagacagattactgcagttcttattaaatgcttacaacttatcttaacgttgtatcaataatttttgttttatttcaatgatataacaatggggaaaaaatttacttacagatcatgatcactatcatcagtgtcatttcctctgggaaagcaaagaattaataccctttacactttaattcatctgagtatcatgaactgaggagtgttatttcagtagagcaataaaaagtaaaatccatctatgtacatgcgtccacatgcttacttgtttctccaattttttcttcacacagacctcctccttgcctgctcattgtgaatgatctatgggtagagatattacaagtttcaagggttttagcctcatgcaattatatcaagcctcaaaagccactgtgtccttggcttctctttcttttttttttttttttcaccacagatgcttcttctgctgacattattgcaaacaattttccagagcagtcttgccttactcatcctaggtgtgaacatcaaggccacaggataggaacaatcttttatctgggaataaatctctgtagagaaaatctgggttaaaacaaaaatctgtgcctctttccaatcttctcatatgacttttttcccttaacattttaggcaacttgggtttaggcagctttcctgatttctgcagagctaaagagggaaaagataaaaattctgttcagcttatttcagatattttattaaatacttctaatatttattattttttttttgtggggtggggggacagggtctcactctgttgcccaggctggagtgcagtggcgccatgtcagctcactgcaacctccacctcctgatttcaagcgattctcctgcctcagcctctggaatagctgggattacaagcactcaccaccatgcctggccaatttttatatttttagtagagacggggttttaccatgttggcaaggctggtctggaactccttacctcaagtgacccaccagccttggactcccaaaatgctgggactacaggcgtgagccactgtgcccggcctatttctgatatttatatattgaaatcgctatacaactatgatactttacagggttcagttaaaaaaaaatgctaaaaagtgtttggaaaaataaatggactataatgttaaaggaaatctgaaaaaatatatcaatgagggagaacaaacagtatatagtaattaaaattgtgtgacaccagcttaaaaaaagactaaacacagagactcaatgcttaagactagctctagtctttagtttctgctttctgtccctgataagcccttttctcccaactcgtctcatatctcaaatgcagagtgttaagtttctcactccctcatttcctgacacaccatcctcattggtttaggcaggcccctctcgttttattttttccttcatcccggaccccattcccattccccttcctccaagtgtacccactcaaatgtgtttgctgtatacttttgaatagaaaggtaatgttgttttgtatgtatgtacctctttaatctatgtatatgtaacattgtgctatagatcctattctgtcttaagttgttacactcaaggcttagttttaaagaaatatctcggccaggcgcggtggctcacgcctgtaatcccagcactttgggaggctgaggcgggcggatcacgaggtcaggagatcgagaccatcctggctaaaacggtgaaaccccgtctctactaaaaatacaaaaaattagccaggcgtggtggtgggcacctgtagtcccagctactcgggaggctgaggcaggagaagggcgtgaacccgggaggcggagcttgcagtgagccaagatcacgccactgcactccagcctgggcgacagagcgagactccgtctcaaaaatatatatatatataactctattgttataggtatacttaattcatttttcttacatagaatttcagagcatgttccctcaccattttatccatcactgtatatacaatatatttcccttgaaaaatccatgttagcatttacctggaccatatatccaggagctgggtcaaaggatatatacatatttaatgccatttagtcctgtcatattgcccttcagaatggttatacttccattagcagtgcacgagggttctcgtctctccacaacctcaccaacacttgcctctctaaaatgtggcatttttaatgggtataaagcactatctcattattgttttaatttggattcttctggttactaatgattttaagcatttcttcatatacttgtccatttgggtttcccatctgtcaattgcctattcatatcttttgcacgtttttaaattttctatttgggttatccttttaaaatttcttcttgattttgtctctgatgtacctctttgagcaacaacaagccttcatgggtttgaaaaggaattatttattctgatgtagtcaaatccatcataatttcatcttatggttatatatttttgaggtaatctttaagaggtctttctctactcttagttcacaaagacattgctggatattttattctgttaattttatagatttgaatttaaaatgttttaatctgtctggaacctgcctttttatgtgatgtcttgatgagtcttttaccgtgatcactgatgaggaataaaattaacttctcttagttttaactttctctttaccttttccacctggtagtagagttgccaatggaattgaaatagtcaagagcaggtttcaatggagaaaatggtgaaggagcaaatctagataatctcaaggctatctgtaataagtatcatatattgagcatgaattgtatgccaggctctttgtctatattatttttatcccacaaaaatcctttgaggaaaatgttgttatctccatttaactgatgaacaaattgaggctaagaaaggttgtatcttgcccagcgtcacatatatactaagctctttttgaacttcatgctctttcactcaaagtgcaaacctcttaaatgtcttctgaattttattttgatatatcctctgcatttatcaaggattaatgaagaaagaagttttatgaggaatgttcctgcatttttaggaaagccatgtggcttgtccattaaattgcaaaatgtgactcatttttctttagcatcttccatatgccagggtctgtgctaagtgccaggactacagctggaatgagaaatgattcctgcccccagagtgctttcttagcaggacaatgggaggtggattctctttgtggtgactagtgtgggctctgcagcaaaacttctggagttcagattgcagctccacttgtattgtttctgggaccttgaacacgttactttctaagcctcaatttcctcatctataaaattaaactaatgaaaatagacctaacatagaggactgttgtgagaatccaatgcaataattcatttaaagaacttagtagcatgcttggtactctatcagtagaatgatcaatgttacctttttttggacataaaccagtgatcacagtagaaaaattatctgataccagtatgctaaaactctgttgttttgcccatagattaaaaagtatcaaaactagactgggaagggaaggtggaaagaatttcagatcatacttccctgtggagctaatgttcaatatatagttgattaagaaattacatgttagttattcttagctttcagttccaggaacaattttctgtctttgggcaagctggcatgctatattttgctggtgaataagatttatataacctatttatttcacatcttataatgaccaggaagcttacagccaaatttaatgctttatttaataagattatacaagcctagggtttgattaaagtccttgatgatttttaactttcttttaaaattttaatagtctaattataagtcttttattttgaaatattctttggaagtagatacattataaataatctgcaaacagtcttcccctggaaactctgtataaatccaaattttctaaattacaggtaccattagcagacgaaaggagttcccatacaggatacccttagatttggtccccaaaacagaaatcaaaaggattttgagtgtaaaaggtaaattaacaaatgccatttttatttctcatttcacttggtgcttcaaacaaaaatcaaatatcctcatgattattctgtttctccacttccgtgttcagtagcacacacaaatctacctttaggagtgctccacccctacccacccccactttcaaacctttaatcacttttcccactatcttcttccaacggcctgatttacatggagatgcattctcctccaatggaaggtagggactgtcattggctcaaagatgtctctaaaatgggggtccagttgcttctagacttaaagaactttccatggtcttagtggccagtcccgctccagagaaggcctatggcctgcacatggcctagcgagaacagcactgctctgctgaagtactggtcccagaagggttgtcttagtccatttatgctgccataacaaaataacaaaatttataaataatacaaatttatttctcacagttctggaggctgggaagtccaagatcaaggcatcaagagattgggtgtttggcaagggctgctctctgtttccatgaggatatatgttgctgtatcctcctgtggcagaaagtggaaaggcaaaagggcaaaaaggggtgaagaacttcctcttacctcgtctataagattattaatcccactcattagggtggagccatcataacctaatcacctctcaaaaagccccaccttctaatactatcaccttggtgattaggcttcagtgtatgaattttggagagacatatacattcaaaccatagcagggattctcctcccctcgcatacatttgcagaagtgatatttgcacaagtgactaggttttccttagtctccaggctttacaattcaataacatattaccgaatgatagaatgtcctgactacattttatctcagataaaaccctagaatcacaaaatgttagtactggaaaggatctttttgatcatgtgcaaccctgctgttggatataaaagaaagtggcatgtccaaggttgcacagtgaattatagacagtcatgtcagcactccctgttcaggctctttgctttgcttcctggaagggattggtaaatatggtttataatgtctaaagctaacaggttgaatggcaactaatttgccatgttctcttgcagcaatcagtccactgtattacattacctaccaccatattttagtgatttttaaagtcttttttttttttgtttctttcaaattcatgttcctaaccggatctttttttctcaccccgtttctgagaagcaagtcaactgcctagataaaaagggaagaaccatctctagatggttgttcttctctcttgagaacatactgttagaagttaataaaaagcaatgtgtctactttgatcttttttgtttcaggactgcttgtaggtgagatcttgtctgcagttctaagtcaggaaggcatcaatatcctaacccacctccccaaagggagtgcagaggcggagctgatgagcgttgtcccagtattctatgtttttcactacctggaaacaggaaatcattggaacatttttcattctgacccattaattgaaaagcagaaactgaagaaaaaattaaaagaaggtaaaaaaaaaaagtatttcacataaaaattgggtgattctaaactaatatttttattaaactaatatttaagttgtgaattatagaaaactttgtaagagaattttagcaaaaaaatcatgagatggactctactatataaataaatattatttctgtagcattttggctcaacttaccaaaatgcctgaatgagaggcaaggcacctgcattccaaactacagaacacttccttccttttcgaatgagatcagaatgttctacttgataattcccaattcgagcaattcatatacttcctttgagaagttcaatgctggccacagagcatatgcttgctgcccaacaccaaaggaagcttaccattctcagggcctgataaagtgttctttgagtagaaacggaggtctgttaagcaccgtgttctttttcttgtgcttcttagggatgttgagcattatgtcctacagaaatgctgactactcttacagtgtgtggaagggtggaagtgctagcacttggtaagtagaagattttgagttgcattttcatatagtggttaattaactaaagaataataaccataatggaaactccattcctccagttgctcaggctaaaagcctcgtcatccttcactcctctctttctcttaccgttcacatctgatccagcagatatggattcaaaatatatccttaatttgactacttctcaccacctccaccacactatcctgttccaagacaccttcctctcccacctggattcttacactagtctcccttagtcttctgggttcagcccttgatcctcttcagtatatactcaacacagcaactgaagtgaccctgttaaaacatatgttagatcatgccactcaaaaccatttaggagcttcccatcttacccagagtaaaaaccaaactttttattgtgatttacaaagctctgtatgatctggctccacctcatgtctcctactttatctcctatactctctttccctccaattcagccccactagccttcctcaaacacaccaggcatgcttccacctcagggcctttgcactgttttctcagtctggaatactcctccttaggtgtcagcatgactggctctcatatttccctcaggtctttaccaaatgtcaccttggggaggcctctgctatatcataatgtctaaaattgcaatccactcccctcccaacacctcatatcgtttcttttctcctcagtgtgattactaacgttcttgcttattccactattgtgtatctcccccactggaatataagctccatgcgggaagttctaagtatccctagtgcctggtacctacctggcacatagtagatgctcagtaagtatttattcaatgaaacatatcttccaaaattctgatgatttgagggaaagatagtctgaattaattaagagtccatatggcagtctattttcaaaaaataccggctgggcatggtggctcacgcctgtaatcccagcactttgggaggacaaggcgggcggatcatgaggtcaagagatcgagaccatcctggccaacatggtgaaaccccgtctctatgaaaaatacaaaaattagctgggcgtagtggcatgtgcctgtagtcccagctactcaggaggctgaggcaggagaatcacttaaacccaggaggcaagggttacagtgagccgagatcgcgctactgcactccagcccgggtgacagagtgagactctgtctcaaaaaacaaaacaaaacaaaacaaaaaaaccatcatgctatgacaaaatatttaataaaaacggtgtgccagctgctttgtaggttctatatgaaacatatttaaggagtttacaacctagaatactttaattttagatttttttcttttttcttttttcttttttttttttttgagacggagtcttgctctgttcccaggctggagtgcagtggcacgatctcggctcactgcaacctccgcctcccgggttcaagcgattctcctggctcagcctcctgagagctgggattacaggcgcgcaccaccatgcctaatttttgtatttttagtagaggtggggtttcaccatgttggccaggatggtctcgatctccggacctcgtgatccacccacctcaacctcccaaagggctgggattacaggcatgagccactgcgcctggccagttttttttctttagctattgagatctcccagaattttatctttggccctcttattttctgtaatctcccctggtacagtctcattattgcccatgatttccataacatctaggccaatggccccctaatcaatgtctcaaggcctaacttctttcctaagaagttaggaaatgtcctagatccatatttctaggtttccggaagccaaagatccttcaagcacaatatgtgccaaattcattattttcttcctcaaatacacttctgtttctttactcagtgcacaacaataccctgccctttgtcccccatggatcaagtcagaatcatcagttggtttttgattccttcctttccttttggctttacctctgatcagctaccaagttccatagattataccttaggattaggtctgaccatgtgtgggtgacacacttcaaaagacacacagggccagatacagtggctcacacctataatcctagcactttgggaggctgaagcaggaggatggcttgagcagaggagttccagaccagactgggtaacatagggagaccctgtctttaataaaacaataaaaatataaaaaaataaataaaaggctcatagacccctgcagcacaccaaccagaggataacccaggatgcaggagtgggagtgagtgtcaatgaagactggaaactgacacagcaggacctgggaaatagatgcctggagagcagaaagccccacaggaaggtacaacagcctctcagtaaacactcagagcctttcaagagtttggggcaagactgaaacatacacccaactccatgagttccttgaaagaaataatagacatagaagaaaatgtccagcacctaaataccctcaaacttttcttgagaaatacaaagcagattttttaaagtacgaatatcattcatattagcaaaacccaaaattgatgatgatgaacattttttatattcgtctttttttttttttaaagaacattgtggatattgaacttttctctttaactacaagcctccatcttatttctgtttctttcccccaagggcattcactatcatgagtttatgcatctttccagaacatttttaatattttatatagtatatatatacatgaaatcatatagctgtaacttaactccagtttggctgctcactgctcaaatgccaaactcaagagactaaggttggtgggaggaaaagcaggttaattcaggagccagcaacccaaggagatggcagactagagtcaggaaactatcccaaatgccctaggctggccagagggattttaaagaggaaggggcttggaaaactgtgtgcaagagttagctacgtacaggtcagcatgtcttgttctgattattatcttgagtaacgggccatctagtggtcagctagactgaaacaggtttgtagattaactgctcagtatttttcttctccaggggacatttcacatccttgatttttatctcatggctagttcctggaattcttaagtaagcactgtttaagaaagttaagcattgtaaaagaaagaatggttatttgcttccaaaatgaagtgatgggtttacagtccctttttgtatttctaaatgattataactagtatcatactatacctatcattctgtaacttacctttttcttttaatactttttagttactttagatctagtagtataggtaaatatagctcactccttttcattgccatgcagtattttattttacaaatatatcacatagtatatattctttatctattcctatcttgatggacaaccatttccaaattttaatattacaaacaatatgataatgaacatcttcatatgtctctttgtgcacatgtgtgagagtttctctagggtatatcccaggagatagaattgctggaacataaggaatgcatatttacagtttcatcagattttgccagatttctcttcaaggtgactaaaaaattcttttctactctaaatttttagtcccagaccctactgtaaaacatgaggaactaaactagaccatattaagcacttgtagaggtagcctagggtctggaacaaaagcaaatcaaatagcctacttctttttttcctccatgtcacacttaaaatttgaatttcagggcagtctccaagggacaggtcagtgggaagaggagaacgcaaaaagctagagcgaattgtatttgctttacctttagggaagtgctgtctagactctcactccttaaggataccagggatgagacacccaagagtaccaaagagaaagagagataggagtaagagcttataaaaaccaggtgcagtggctcacacctataatcccagcactttgggaggctgaggcgggtggatcacctgaggtcaggagtttgagaccagcctggccaacatggtgaaaccctgtctctactaaaaatacaaaaattagcttggcatggtggcacgtgcctgtagtcccacctactcaggaggctgaggcaggagaatcgcttgaacctgggaggtggaagctgtagtgagccaagattgcgccattgcactccagcctgggcaacagagagagagtccgtctgaaaaaaaaaaaaaaaaaaaaaaaaagtaagagcttatacctattgaatacttactataatccagaactattttaagtatgttcatatatttaatctttataattgatcccaaaggatgagtccgttgtttctatttattgccattgccttttttcaaagatgtaactaaagcatctttatatatacagatgtatagataagtggagaggcagcctggccgtataactgcactcatatgcctttctagcctgctaaaagaagagagacttccaaaagccaaaatcccaagagagacccaatgtaaaatgtgggccaatctttgaaaatgtgagtgtccttgaacctgagcaatccgtagaagtatttctcatccttgagagcagtgtgggaggattaaaaagagaggagctctcaactcttaccccctaaaagtcaatagagtagaaaataaatttctgatgtttctagagaaagaattaggaaaaggcacctagttgtggaggggcaagttccgattaatatcaaaaaaaaaatctttaaaataattaaatcaattagagcaaagactgagaacaacctaaatgtctacagaaagggaaatggcttaaatagctttggtgcatctgtaccaaaatactataatttaatgtataaaatcacttgtaaaagaacaaggaaactttatgtattaatatagatctctaaggcatattactaaatggaaaaaaagccaagtacaggataatgtaaacattctcccaccattttggtgtggttgggatggaaaggtagatgggaaggctatatcttgtatctactatttggaagaaagcacaagaaacaatggtcatcttctgttgggaggtggagggggacagggactgctagaaggagacttttcataaaatatccctttgtgcttttggatttttttttttttaagttctctcactcaggctggatgcagtggcaggatctcagcttactgcagcctctacctcctgggctcaagcaattctcccacctcagccttccaagtagctgagactataggtgcctgccaccacatctggctaatgttttgcattttttgtagagacaatgtctcactatgacgcccaggcttcacttttggatttttgaatcatgtgagggttttacctctttaaaaaaatgcttaaaatacatttaaaaaatgaaaatgaaaaagaaacacaaattttttaagtgggggaagtgggagagcaagtcaagtggtctgagtctcagacatttgaggacctggggagtggagcctcctgggcgactgagagagtgaagagatgttatggggggatgaacccaatcctctctgatactcttcgatgggtattagtagagacttgaaattgctttttgactaagtaataatgatcattaaaatttcctgtggggtagtaagttctgtgtcaatggcagcactcaaggacaagtgagataaacactccagggacattgggaaaggggacttggggcctcagataggaatttagattccatggaatgcacaaattttacaatctagaattttgtgatttactctttcatgtctcatgttcataggtcaatgccttgactcaaaactatttattttatctctgttatctttaactttagagtgtaattcttatcatcaggaatcaatttttagcttgtgtgctagcggacaatgttgtaatcacagaagatgtgctgttcacatttgtttaccgaatgttttggaggtattccaaaaatcttcccttcctttgtaaaatgatgacttactttggaattgcatgttttaaaatgttattttcttttaaagaataaagttgtataaattaattgaaagtcaaaagggattcagcgttctaaatatttatttatttgattttgtcttaaaggttaacagcttttgctttaagagtacttggacaagtaaataaatacgtagagcagaaccaaaattcaatttgtaattctttattgtggctagttgagaattatcaattagataatggatctttcaaggaaaattcacagtatcaaccaataaaattacaggtaaggaaaccaaatgcacaaattagcaatagttttatttagtttgagttttattctcatctgattatgggaggatgaagaagaagaagaaaaaaatgtaattctgcaagaaattcctttgtgaacaagcaaaatatacaaaggtctttcccataatatctgaagtgaagcgatcttcagacagttcactagagatcagagaagtgatatcttagacctctcgtttaacggggtggaggtagatgggcaagtgaaagcactcaagcgagatagacccagggcttattgagaaatgggaagcaggaagggaaagagtgggagataaggcttaaaacacagagtagaggccaggtgcggtggctcacgcctgtaattgcagcactttgggaggccaaggcgggcggatcatgaggtcaggagttcaaaaccagcctggtcaatatggtgaaaccccgtctctactaaaaatacaaaaattagccgtgcgtggtagtgcacgcctgtagtaccagctactcagaaggctgaggccggaggatggcttgaacccgggaggcggaggttgcagtgagccaagatcaagccattgcactccagcttgggtgacagagtgagactccatctcaaacaaacaaacaaaaaacagagtagaatcaggtcatttcgccttaaagacaccatttcactccccttttaaaacattgcttctttttagggtaccttgcctgttgaagcccgagagaacagcttatatcttacagcctttactgtgattggaattagaaaggctttcgatatatgccccctggtggtaagtaagagttttctttctctcacacccatcatctatttctgtactatatactggaggggccaccaatcagaagaccttttgtttcaaaagcttcttttccttctttccaataacttgaaaataacttaaactccagaattgaaagatttcagaacaatgatagatattagagaccacctagtccaacctactcatcggcagttgagaaagctgaggactaagtaaggtgaattcagtttcccagtgtcacaggctaataaattgtagagctgggtctaaaactgatagctgggactgggatggaagaatgatccagtgcccccagcttctctgtcttatctttgctaaatcctgctttatatgttactgttatcctatagtgaaagcattctgtatcatgcaagtactgaggatacacaacagcaaatgtgtatcctccaaatccttccaaacaacatttgcttggaaacgggagaaaagtgatgagccacctaagtaaatcaacatagaagatttccaaggttgagatggaaaatctcaagtggatttgcaaaactggaagcacaaaacaaaaccatttgttttcagtttgtttcagaagcttaacaagacaaaataatcaatgaagactagttcccaggcacctagtggccacatgggtgagagatgcatgtggagctgggagaggaggcaggcaggatgttagcagcatcgcagcaggctttctgctggcccacttgcccaacacaaccattttggtggcgtcaggactagtgatcgggactatttacccaggcattcttaggatctaaaagtactgtggcagttagggtttctttctgctacttattgttttatttatttatttttttaagtgtaactccttttgaacctgtgtgcctgttgcaactacgctgagagggaacaataaaagttgtgtctatgggccgggtgcagtggctcacgcctgtaatcccagcacttgggaggccgaggcgggcggatcacaaggtcaggagattgagaccatcctggcgaacacggtgaaaccccgtctctaccaaaaatacaaaaaaaaaaaattagccgggcgtggtggcggggcgcctgtagtcccagctactccggaggctgaggcaggagaatggcgtgaacctgggaggcggagcttgcagtgagccgagatcgcagcactgcactccagcctgggcgacagagcgagactccgtctcaaaaaaaaagaaaaaaaaagaaattgtgtctatgctcggtgccttttcttcctggaggctaggtctgacggtgtactcagaaactaaaggcacaaaacctctaaaaggaaagtgagaattcagaggcaaaaagcttaacctgatttggacaacctcattgtcccttccaagattatgctctgctccttctctcggagggatttgcttcactgagaagccatccatttccattaggtcagtcctcttttcacccccatattgcttgctccaggatagtgggatctgagggtagttcatatcaattgataggtggttgcttgacatagaaactgaagtatcttctcttgtttccagaaaatcgacacagctctaattaaagctgacaactttctgcttgaaaatacactgccagcccagagcacctttacattggccatttctgcgtatgctctttccctgggagataaaactcacccacagtttcgttcaattgtttcagctttgaagagagaagctttggttaaaggtataacttgttccatacatgtattcagtgagtgttcactaagacataaagtctgctagtctgggaagtgggtggtgacatgtgaacttgagtaagatgcaattcctgtcctcaaggaacaaaccgtcacaatacgatgtaatgtgtgccgttattcattcatttattcatgcattcattcagcaaatatttattcttttttttaagacaggttctcgctctgtcacccaggctggagtgcagtggcatgatcgtggctcactgcagcctcgatctcctgggctcaagtgatcttcccacctcagtagctgggactacaggtgcccaccactgaacccagttacttttttttatattttgcagatacgagtctcactgtgtttccccggatgatctcaaatgcctgggctcaagcactcctactgcctcagccttccaaagtgctaggatcacaggcatgagccaccacacctgtcctctatttattcctttattcaataaatatgcattgagtatcctatgtacaccctggacaccccctatatacctggcactattccagtctctgggaataaaggaataaacaaaacaggctccccaaaatccaggccatcatgaaacttaaattctaactggggagacacaaacatgataaataaataaagctttatgaatagatggtgatggctgatatgaagaaaaatagagcagggaaagaaaataaggtgagaggatgcattgtaattttagacaagctgactgggcttaagtttcactaagaggatggtgtttgagtcaagagctgaaaggaggtgaagaagcaattcctgtggctatctagaaggaagtacctggtggagaacagcacgtgcaaatgccctgaggcatgggcatgcctggtgctccaagaatggcaaggaggccagtgtgactgcagaggagtgagaagaggagtaggaagtgaggtcaggtaaggaaaaagtgagggagcaagggaaggtcatttaaggcattagagagactcttcagggcttctgtaaacagttgtgccgtggacaaagtacctaagcaatcaagtgaatcgaggctgaaatctagcctgtgctccactcccccggccacataccctagtttagggctgcttccacctagagcaaggagtgcccatgtcttatccacagcaatgtgctgtggggaccagaaggagccctagaactttaatttcagctttgagagtgaaaaggggagccactgggggattttgagcaaaggagtgcatgacctggcttatattttaccaggtttgctataaaagtatgtgtttggttttgaagaataaagatactgcttcctataggtcaagagacaaaaaatagaaagagagtagcagtgattattagcatggttgggcactttggagtcctcttctagctaaggctttataaatcttactgaggtttatgaccatctacaaaatatgatttgtgccatcattttaaaattactatattttaacatatgcctcaaaaccacttgtacgatacttcaaaaataacacaaaagaaatgtcttgggtattgtgagatatgggtcataaaatcataaaatttaagatctagaagggaacttaataatccaagagttgttccagttgggtttctttaaaatcctaaactcaactcttcattttaaatacagcaaatctgagactctgagaggaagggtcaatatcattttcaaggtcatgcaaataatgtagttatgaattataaacatacacatcaaaatttttactaaccttcaaatatgatttccaaatatgcattactttttttaaaacaaatagtttgttccaaaaaggatttgaggtttacaggtttaaataacaaatataatttacagcctaatttatgaaaagtgctgcatgtacgaaattgtcttgagtgctttaaattggaaagaaataatgaaagactgaactaaggctttaggtttaatctcataatttccaggatgtaaattttcctatcaggaaaaaggttctccagtttattttttagtgtcagtaataataataataataataatcccttatatatgcatggtgctttctagtttacaaaatcttttactttagtatttcatttgagtttcactgcatggaagaaagtattatctatactataggtattaggaaattgagtcacacagaactaaaggaatttgcccaaagtgacatggtaagttagcaacaaaagaaagactagaagctgggtgcaataccagtttattgcactttcgactctactaaactgccccttcctagtacatgtgtactatgttgattttaaaatacagattgaggccgggtgcagtggcttatgcctgtaatcccagtactttggaaggccaaggtaggaggattgcttgagcccagtagtttgagaccaggctggataacataacctggcatggtggcacacccctatagtcccagccactcaggaagctgaggtgggagaatcactgagcccaagagattgaggctgcagtgagctacaatcacaccactgcactccagcctgggtgccagcaagatcctgtctcaaaacacacaaacaaaaaaaacaaaaaataggttgagtgttcctgatctgaactgcttgggaccagaagtatttcagatttcagatttttttcagattttggaatatttacatatacataatgatatatcttggggatgggactcaagtctaaacatgaaattcatttatgtttcatatatactttacacacagcttgaaagtaattttacacactattttcaataattttgtgcatgaaacaaagttttgactgcattttgattgtgacccatcacatgaggtcaggggtgaaattacccacctgtggcatcatgtcagagctcaaaaactttcagattttgggggcatttcatatttcagattttcagattagggatgctcaatgtgtaaagacaagtaataccatattaagggatctcgttttgcattggtcatcttcaggaagttcctctaacaagaaaaagtaagtagcttctagaaactggaaggccataatacacctggtagaattattatgtcaaattcacatttttaatcatattaatgaatggaatttgttgatgttcaggtaatccacccatttatcgtttttggaaagacaatcttcagcataaagacagctctgtacctaacactggtacggcacgtatggtagaaacaactgcctatgctttactcaccagtctgaacttgaaagatataaattatgttaacccagtcatcaaatggctatcagaagagcagaggtatggaggtggcttttattcaacccaggtaacatttctttgtcttgtttcatctccctgtagacatttttattttctcccccaccacactcatctggcctccatgcctttgtccaccaaatgagcatgcaatagatatgaataatgcctagaattgaaggacccctacaggttatctgcgtcaacactcttattatacagaagaggaaattagcccagggagttttactcagggaattcatggcagagccagaatcagaactcatgtctcctgactttaagcccagtacttccttcatgattctaaatcaccatgaaaggctagtaaggttattggcaattatatcatatcctatgtaataaatagtggttgccatgtagacaaaggtactgatgctccttctccacaacgaaataaataaaaagtgggagaaatactgattgttacatgttaatctatctagctatttaatgtaaactcatttgagtatgtatttttattacaactaattattatgtagtcgtataatacatgtttatattcaaagtttagatcgaatgttaatatcttccctgttgcctggatgtttagataatgatggagtgtgtatatttatatatatgtaatttagatgtagagagggccttcagtattaatttactgaccatgtaatgtgttttattttgggtacaattatagggttagcagaaaagactgccctattgattagcatttgccgccacagatataggcagagggaatggccacattgtttaacatctctgatctagtcatgtttctcagttttatagatgagaaagatgaggtccagaaagataaagtttattcatttattccttcaacaaatatttatgtacctgctaaatgcaatggacattgccttagtccattgtgtgttgctgtaacagaaaaaacgacacactggataatttacaatggacagaaatttattacctcatggttctgggtcctaggaagtccaagatcaggggggctgcacctggtgaaggcattcttgttgcattattccatggtggaagggcaaagagaaggcagagtggagggttggtgggagtggagtataaactcatctttttataacaaattcacttctataataagcagcattaatccatttatgaaagtggtacgccccatgacccaaacacctcccattaggcctcacctcctaacactgccacattggggaccaagctttccaacacatgaactttgggggacacattcaaaccacagcaggcaccaagaaaaatatattacctacttgcctcacaaatcttatattgcagtggggtaggccaacaataaactataaataaaagcattacaaattgagatgaatgctagaaagggcaaaaagggaaccttaaaacagagaataacgggaaaggggagtttatggccttgttgtggagatacttaaggtcagactaaaggatgaggaagagataattgttcaaagactcagatgaattctgcaaacagtgacttgcctgaggttacatttgcagaatatatagaggacccagatctgaggccacacttccttcctgtccctgctaacagcatctttattgaggagggagagacctttcttccacctccacaatggggctcttaaccagtcttactgagtcagctggagtttcatctccagacaatgctgccctaccctctcataaaaagggcatttgtaaatagggagtacataaataaactaaacatatttttgtgccttgctgattgctgacaggacacaatcaatgccattgagggcctgacggaatattcactcctggttaaacaactccgcttgagtatggacatcgatgtttcttacaagcataaaggtgccttacataattataaaatgacagacaagaatttccttgggaggccagtagaggtaaatgaagaactttctgtagtattttacaattggctgagaccattgaaatcatctgttccactctttattttataaatctatctcttcactacttaaacatatattgagtgtcagctatgtcctaaacagggatgcctgctatatcctgggcactgaggattcaaaaataaaacacaaacaatcagcgtagtgcagggagattgtcatttaagcagatagtgaaaaataagagtcttgataggtacatggaagtacagaggggccctcctgatcctggctgaaagatggagggagtttgtcagatgtgtccagatgtgtgggttaaatctgaaaaaatcagaatgagttagccaagtgaagaaaaaggaagaacattccagacatagataacagcgcacagagcagtacagtgagcgtaggagggaaggcatgtctgggaggctgctggtggtcccttctggccctggtcatacatgcagactgtggccaggttggagttggcctttagggtccccagctccttgccccatgtcctttgctactgctggatttttaaaggtggtaactttgatggcttatgaaaatttcacaaagaacaagacatgttggaaaaactgggttctatattaatattagctgcccacatatagctgctgatacatatttttctaattactgtgtttgcattattttaaagtatatttaaatgtacagtaattggaaataatcctcattgttgacatccttcacaaattggtgtttgttaaaagtaaacaagcatgagaaataattttttttttttgagatggagtttcgctcttgttgcccaggctggagtgcaatggcgcaacctcggctcactgcaacctcctgggttcaagcaattctcctgcctcagcctccaaagcaggcgggattataggcgcctgccaccacacctggctcattttttgtatttttggtagatatggggtttcaccatttggccaggctggtctcaaactcctgacctctggtgatccacccaccttggcctcccaaagtgctgggattacaggtgtgagccaccatgcccagcagagaaataaaatttaatgcaaaaattgcaaactggtggcccatactgaaaaaaaagaatatggatataaacatagacatagatatatgccaacatttaaggatccagatatttcaaataaaaacctgattcccaacttcccttgataaaccaaaagacctgaaagcaaagcaccaggcattggcatggcttctacaatttactgcagtccccaccagtcacaggacgtatgcatgtgcatttatgttcatacctgctttgtgcccgggcctctgcaggcatttgtgcttgtggtccctagtttgggaatatgtctcctttccctgggatcatttagagttcaccggagattcatgttctgagtctaagctctaagaaggatctcttgaccttccagctacctgaggtagctgaaattattcttctctatagggataatgctgtaagaggcctcttgtcatcctaacaaaatttaaaccccagcccaggatgctgcttccatgtaaaacctgggctgttattatccagtgtggaattttctactccagcatttcctgaaatgtgttccatgaaagagtgttaggtggttgagtgtgcattaattaagttaaacaaattaatttaaattaagttaaacaagttctttaatccagaattcccctgttctgtaacatgtatgtgattaagtgtggtgactctgggtgtgaaaaggggcagaggcagggcacagtgcacagcatttcccaaacttatttgtcatgcatgcttttcacatgcagtatctcaagacacctgttttccaacaaatgctgctatattctatcagggagaacaagaatgttgacctactttcctacatttactaaaatttgaaggaaggattgagaaactttaacatatgcccaatccatcttgcattattgtgctaagcaaaggaaaggggaggcttggagtaaaggaagtgccaacccctcgggctcaaaattatctctcctgtactttccacaaattagggagcatttggatgacagagtttctctggagaggagaatgacttaactccgtttatgtcttcagtttcctcctagcagagtgggaagaagagcagcagcaactaaggatttggcaggcttgagtggggtgctagtggtttggggtggggtaccaggggtttctgcaaacaaaggcggtgacaagtggaaaagataaatcatcaagagatggaaaaggggtgcaaaggaggagctcagagaggaccaaagatagatgcacccgctttcaagttatgtggaggttccctgctctgggttctaatgaaaacgatctccattggcacacaggatgctgattcctgagctaggcacagaaaggaatttattcagttggcaaaaggagatgaagatccagatttaccatagccatatgtaaatgaaaatgtaaccagaagtgacctctgacatgttgcttttgttggttcactcaggagatctcagacatcttatttacatgtagaagggaaaggggaaataccagccttgtttagcacctgccatgggcataggattttcagtgtctcatccagttactctcagaagagctctgagagaggaggctggtacatgtcaacccacttttcatagctctatcctccctccctatcaaatgatgaaagaaagcatggtttgtttctctattatctttccaggtgcttctcaatgatgacctcattgtcagtacaggatttggcagtggcttggctacagtacatgtaagtatttaattgatatccaataacgagttatgtgtccatttgtactaggtaacataaaagttaggagctttgccacaaagtcacagaaatctgggcttgggtaaccatgactaaagtgggattcacttatgtaaatctttctagcaatctttgtaactatcctcacaatttttttgaaaataacaatgttggtcaggcatggtggctcacgcctttaatcccagcactttgggaggcctaggcgggcagaccacgaggtcaggagatcaagaccaccctggctaacacggtgaaaccccgtctgtactaaaaatacaaaaaattagccgggcatggtggcgtgcgcctgtattcccagctactcagaggctgaggcaggagaatcacttgaacctgggaggcagaggttgcagtgagccgagatggcacaactgcactgcagcctggcaacagagcaagactccgtctcacacacacaaaaaaatttaatccttatatgtatacattctgtatacttatagaaattatatatatttatagagatatataattttatgattatatatgtgtatacgcatatggcatatgtgtatatacatatatctgtgtacatatgtgcattgtatatatatatgttttctatcccatctcatttatccaggattttgggggatttatgtgttattcataaagacttatttcttcattttagccacttggcagttgcaattttttttctttttttttttttttttgagatggagtcttgctctgtcacccaggctagagtgcagtggtgcaatcttggctcactgcaacctccgcctcccaggttcaagcaattctcctgcctcagcctcccaagtaggtgggattacaggcacatgccactacgcctggctaatttttgtatttttagtagagacggagtttcaccatgttgaccaggctggtctcaaactcctgacctcaagtgatccgtccaccttgacctcccaatgtgctgggattatgggcgcgagccaccacgcccagctggcaggtgcaaatttttctaggctgtttaagtattttcatgcattcttaaattgcatgttctgagcataaattaacatcctattaataattttaatcacgctcttatctttagtgcattcattccttcaaggactgttgtaagtttatatgggggaggagagattgtccacttttctgccacttctggttggtgtcaatatatctacttctggcagcacctctgcccattcatacacacctataatttgttgtttgccatgatggcgtgtggctggaagaaacccacacttcttagccttgtgctgttgtgtgtaaaattaaagtggaaaggttcaaaacaagaaccttgggaactctcctgtagagtgaggtgcccagatttgactgcatggaatttagaccaagcttctgaccggccagaagtcattttttgcttactttgggcctctcaggtttagattatggagtttgcttaaagtccagctgctggaaaaatgagtcactaatgtacaccatttgtgctggattatgaaaatgatccttcgagcatcccatctgcagcagcagtgttgccataatacctttgtcactttcccactttaaatagaatcttcttgcttacttgtccccaatgtaggtaacaactgtagttcacaaaaccagtacctctgaggaagtttgcagcttttatttgaaaatcgatactcaggatattgaaggtaaaaacagcaggatttacgctgtaattttggctaaaaataaagcatgtgtataaatagagagcttctctgattagtaaaaatgtgcttactcaaaaagtgaaatttcttaaccaaatactttagcaggttgacatccaagtaaatattacttccattttttacaatagataactctttaatatagtcggaagctaatattaaataacaatgactaagctaaatgtatttgctattgatcaataaattgttttgactatgttatttttaaagagtgtaactagttgtaaagccacattaaggtctaattccagaaccaggaatttctgttacttttgtgttagccttccaatctgggaccttgaattctcttatcaccctgttagttttccatcccttagcctttctgtattccaaggggcccagaaaataaacatttctctgcctccatctttaacttagtctctcctgtacccctttcttttttagtctctcctgtaccatcctttctttaaatgtacccctgacccttttatttaacccaaggccctcacatccctctgctggttggttctcccttcctggtccaaaagcaagtccacttgcacactccagtcctcctggtctccccattgcctccagggtcagaatgaatgttgctgcctctgccctgatattttccatctattgctcagaagcctgttcctacaggaaacttcccaactaccagcaaattaaggcatctgttcttcctccctccaacatcccccaaacatattaccaatacatatttatctttaataatttcttcattaaattataagttatttgagagcaatgaactgttaattatttaaagacttcctggtattgtcaatagccatgaatttccattagaaccactgaaagtatctaaacttccaaatcacaaatcatttttaagtgtgttcaaagatttgctcattaatgattctgttctgacaggttccaaagcagctgaaaacagtttactcttatatttgtctgtttgttttcttgtcttatgtgccagcatcccactacagaggctacggaaactctgattacaaacgcatagtagcatgtgccaggtgagcctatttccacaaaggggagcatagactccaagttctcatttttgttaacgtattgtttctttacatattttcaaattttggtatgtccagaagatacaaaattgttcaattgtttaaaaatgcagaacatatatattcttaaattgctacttaccataaaaaacagccttggttttgctcataatagttttctctgtctgttttgtcttctgattcaaacagtgtaatattaattttttctctttcagagggatagaaatgtgatttaaaaaattaggaaaaaaatataaaagattctctcaaaaacagcccctactctcttacttagaaaaatcacatttacctaacaaaatccattatcagctagattctcaactcaagctgcacattgaagtcagctggagagctcttagagctgtccaaatgtcccgggctccagaggtcattctaatggtagccagggttgagaaccactgatgttaaaccctctcccaactaaataccgaggcctcaattggccactgtattagtttcctgttattgctaggtaacaatttattgcaaatgtaatggtttaaaccaacacagttttactatcttgcaattctagaggtgagaagtcccaaaatcaaggagctgggtagggctgtattccttctggaagctctagaatttctttgcctattccagattctagaggctacctgtgttctttggcttgtggcccctctctgtcttcaataccagtgtcacagcatcttccaatctgactgtgacctctgcttccatcatcacacctccttctctgactctcctgcttcctttcctcataaagattcttgtctttacattaggcctgcacaaataaccccctatctcaaatccttaatttaatcacatctgtaaagttctctttgccacataaggtaacatattcacaggttcaggggattaggacatggacacccttgggggccattattctgcttaccacagccaccatcctaaaacatttatgaaagtgtaggttttttgccgggtacagtggctcatactgtaatcccaacactttgggaggccaaggagagagaattgcttgagcccaggagttcaagaacagcctgggcaccatagccagaccccatctctacagcaaattttaaaaattagccagacatggtggcacacacttgtagtcccagctactcaggaggctgaggcaggaggattgcttgagcccaggaggttgaggctgcagtgagctgtgaccacgccactgcactccaacctggacgaaaaattgagaccttgtctccaaataaaaaaaaaaagaaaaagaaaagaatatgtaggtatttgaaaatatgtatatacttttggctttggtgatcacacagtgtgatcagagagtggtagagccaggactgaaacacagacttcttccctgttctttccatcgtccctcagtcctttctattgtgttctattttcttaactcttgtattgtcaataacagtgatatctgtggatggcattttgctgattttacttataatcatgcacccagtgtggataacttggaaattcaatagtgttgtgcaaaagatgagagctgagaaggaccttagggatgatatcataatcctcttgttttggaaatgaagaaactaagacccaaagagataaagtcgcctgccaaatgctcacagagttagaggcagagctaggggctcaaatccccaacctctgatgttcaatccagtatctaaaccacatcttttttttttttttttttgagatggagtttcactctgtctcccaggctggagtgcagtggcgtgatctcggctcactacaacctccacctcccaggttcaggtgattctccttcctcagcctcccgagtagctgggattacaggcacatgccaccatgcctggctaatttttttatttttagtagagatggggtttcagcatgttggccaggctggtcttgaactcctaacctcagctggtctgcccaccttagcctcccaaagtgctgggattacaagcctgagccaccacgctcagcctaaaccacctctttcaatcagtgtaatctaagaccactaatcccaaggaacagcacatagtttctccctgcctccctcccagctgtttcccagtcttctctatgtcccaagcccaatcgcttcttaggattccttcactattcagccctatttccttcctcatcagcatttcttccttccagcatttcctacttccttctgtggccagtccctgctctctgttcccgctcaaacatctttcctcattccctaatgtctttccagtaaggtcgccctttcccaggcagcttctttccccctaaatgccattcctacccttgggcacctaccagctggggaggagcatgatcacaattacctttaaatttgtaacagttgtcaaagggaagtgtaagcaaacttctgggcagagctcgaatcagtgcctgggaccctacagggaggcatctagacttgcaataaagaagagctctctgatagggtgagacacctgtgggatagcctctaccagtaagaactccagtgaccttcaggaaatcagtttacttctccaatcctcttctataaagcaaagatattgcactaccttatctcaagttttctgccagttctaattatccacaattctgccgtacagaaaaaagctgttatcaaaaattcattcatttgacttcattgtcaggaggcctaattccagattatcaatatacaaaagaaagcaaggagaaatgcaatcttgaatagtctatcctttggtttttacaaattggggacaaaatgttccagaaaggcgggtggaatatgcttttggctctgttgacactgaagttaggttgggtaaattccaaaaggaactgtgtagtacttattcatgtaggaacttctttgccttcaaatattctctctcctgattaaaaaatgccagcatgaagtttctgtgttcagagggtctctttcgtgtatttacctttttacaacctctctgttgtattcctaagaaaagaaaaaaggatttcatttccctcacaacaaaatgcctttggggaagattgctggttttggcagcaggcaaagggcttcttgaaaggaggatttctgttccaccattgaaacagtctccatggcaaccagtcatcaaggctccagcaaccttttcatagacactctccactcgggaggcccttttccatcctgctgacaaagtgtttgcatctgtgagcaagagtgctctgcttctacccatccaattagggagatgttcggatgtcacattagagttccaagtgttttatattctgttctaaattgttaatttggtgaagaatagggttaaatttttatgagtcagagattttagaatacttttctttattgtggcaaatattacatctatgacttctaatggggactgcttttatttatttatttatttatttatttatttatttatttatttttgaggcagagtcttgctcagttgcccagactagagtgcagtggtgcgatctcagctcactgcaacctctgcctcccagcctcaagccattctcgtgcctcagcctcttaagtagctgggattacaggtgtgagctaccacagccagctaatttttgtatttttagtagagaagtggtttcaccatgttggccaggctggtctcgaactcctggcttcagctgatctgactcagcctctcaaagtgctgggatgacaggtgtgagccaccgcacccagctgggactgcattatatatgctctatgaggtgtcattgaggaaaagatatgccctgacccctcactaacttgcttagtatctcctcttccaccaacattcatacctgtaggtgagatcaattcattttaccccttatgaagctgtcttttaatttcttcctttaatcctgactgctctcccaagcttcactctcaaacatccagctgcctttcaagcatcttgaggtgaggctggaacctgaaatcaacttttacagaatcacactccgtctgtctctgccccagcctcagccccgccagcctgtctcttttatgtcttctaacatctcttaatggtagctctaagcctctgccacccaaaaccaaagcctgggaattataaagataaatttaaaacacaaacttatacttcttcacagttaattttacaaataagaaaatgagcttagaaaggggaaatgatttgtgggaatctcagaactggaataaaacccaagtttcctgattctccatttcagtattcttttctctcttacaaaacaaaaacaaaaacaaaaccctcccattgtgccctttttgcatttccgcttaaattcctactagcagaattcctactgaaaggacagtccttgaaacattttctatataaagtagctattatgggaaatatagaaaatagagaaaagcatgaaaaagaaaagagataattgcttataatctcaccatccaaagtagctactaatatttgtgggtttgtttgtttgtttgtttgcttttaaagagggattctcactctgtcgtccaggctgaagtgcagtgctgcgatctcggcgcactgcaacctccgcctcccaggttcaagcaattctcctgtagttaggattacaggtgtgtcccaccaagcccggctaattttttttgtatttttagtaaagacggagtttcaccgtgttagccaggctggtcttgaactcctgacctcaagtgatctgcctgccttggcctcccaaagtgctgggattataggcgtaagccaccgtgccttgccttagtgtattttcttccagcttttcctggacatgtttattgaatctcttttcaacatacaactgattttttccttggaatatgcttcattagaaaatgaactaacgtgagaatccaaagacctggattcttctgtagctctgcatgaattagccatgtgaccttgaaccagtgccttactctcatcctgagtttccccagctagttagcttggtgtggatgacttctgtgttccagtagagtggtctgttgagattattgatcaagtgaggaaagagaatagatgactcaaagatctcttgcaactctaaagtcagagattttaacccatacattgtagaaaagcaaataaatggagacccaaatttaaaaattaaggtctactaaggaagagtgtcctttcttaaagactcttattcacttatttattatattttctaacctcttttttattttagctacaagcccagcagggaagaatcatcatctggatcctctcatgcggtgatggacatctccttgcctactggaatcagtgcaaatgaagaagacttaaaagccgtatgtgttttcttttaaatcgtgttgtgaatgcttcattttcttttctgaattattttatagacaattttactttctttcatttgaatataccacttttatagaatcacccagaatatttttttttttttggaggtggattttcactcttgttgcccaggctggagtgtgatgcagtcttggctcattgcaaccgcacctctcgggttcaagtgattctcctgcctcagcctcccgagtagctgggattacaggcatgcaccaccacacctggctaatttttttgtatgtttagtagagacgaggtttctccatgtcagtcaggctggtctcgaactcctgacatcagggtgatccactggctttggcctcccaaactgctgggattacaggcgtgagccaccaggcctggccagaatattcttttcaaaacataattaacctaagttttgatttatcaaagtgaagcagaagcatacactagcatgctctgtaaaatatgagtttatatgctaatgtgttcagactttttcaagaagaggaactgctcttcaatttctttgaattacagatcacatccctgcattgtgctatctcatcaacaggtgaatgcatttaaacaaaaagataatgaaatgaaattcaagcttctctcttttcccccttagcttgtggaaggggtggatcaactattcactgattaccaaatcaaagatggacatgttattctgcaactgaattcggtaagctccacctgcaaccatttttcctttactattactattcaaaatatacaggctaaaagattataaatatcatctctccataatttccttaaatccttgaatttgttaaacagattccctccagtgatttcctttgtgtacgattccggatatttgaactctttgaagttgggtttctcagtcctgccactttcacagtgtacgaataccacagaccaggtaatcaactccatgctaacatttcttcagaagaatactttgtattctttccagaacatttagaaatccactagagtcctgtaaattttatgtattgcctctcttagggaccactcttcatgaaagtcccaatttgaacattcaaaactactgcatacaaaatattgtacataaactacttcttgacattgagcagaccgtttcacctcagtcctcagtttcttcatatttaaaataactggattatagtgcctccaacttcaatattctttgcctcaggtttatctatggtgttcacagataaatcatatctctccttttgagagaaatcaactcaatccccccagaacaacttctagcccatctatattcttgttacactttgcagatagctctattatagcagctgtcacattgcattcaattatttgtatgtctttttcatcaaccccagggtgttttcattcttgtgtccctagtatctaacgcagcgtcgggtatagaatgtgaactcaataaatatttatgaatgggtgatcccacatttgactattcagccatttttgagaatgttatgtggttggagagcttattggatcacaagacagatgactccaccttgggcagttctacttgttagaaaattcttgaagtgaaccaaaactctgacacccattcattctagttttatattctgaaatcacatagaacatacatagtccctcttccccttgagatagatatatagagatacatagatatatgcttttcttcccttgtccaccctaaacaattccaactctttcaaaagatcctcatgcaacataatttattttcctcttacttagagaagcatcaaatgttttatttctgagaaacgagtgtttcaagcacagaactaagtgaaaaaggggagatctttctgagggtagcggaacccttcccaggacagccaattcataattttacctccctgggccttagctataaaaagaagggtttaaaataagcaatctctgaggctccatgtaagacacttgccaattagtaaatgtgttgttcttcaatcaaaccacttctcttaaccacacttttgttgccacagataaacagtgtaccatgttttatagcacttccaatatcaaaattcagaaagtctgtgaaggagccgcgtgcaagtgtgtagaaggtaaactttatttaacatatttaggctgcatgcttatttaaagcagtcgttcataacctgaggttaatctgggggacactgtttggtaaactgttctttctcagaagtagaaatgctatctcagctaattgaaagctaatgattccttgagcattgtaaaactacattttcacagttcctgaacaacctgatagttcatgctgtacagaggcagggaaacaccatcgagagggttgttgaatattataggggcaacatgatgtgagattttactttcacctagtctttttatcatataagacaagaggctcagcactgaaccactagcttctgttccttttctcttatacttcccagttaatggaattcggtttattgtccagttccatttagtctttcctaaattgaagaaagccttcttggccaaggaaaagatccagaactcaccaataatcaacagctggctccatgagggtctcagttagttttggttttttcaaaatcctcaatatctacacattttctaggtacttattgtgccattttatagctataaatcagtcacattatcattttgggtccttcaaaggacttctgattatactcaaaatggaaaatttccccctttcatcaagggaaccacatacatttctaaagacctgaatgtggagtagccacccagtctaacaataagtcttatgccaggggtgtccaatcttttggcttcagtgggccacattggaagaagaattgtcttgggccatacataaaatacgctaacactaacaatagctaatgagctaaaacaaaaatcacaagaaaaatttcataatattttaagaaagtttacgaatttgtgttgtgccgcattcgaagctgccctgggctgtgtgctgcccacgggccatgggttagacaagcttgtgacatgctcaagattttgttttttgtttttgtttgttttgttttctttatgtaatatttcactttatgaaagaaaagaaaatgggcaggtcttagaaatctgacatttgtaaggttatattgggttgtctctgggctcatgagaaaccgtgtttactcctggaaagagtgtctacttctttccattaaccttatttttaccaattttcacaaaatccagctgattgtgggcaaatgcaggaagaattggatctgacaatctctgcagagacaagaaaacaaacagcatgtaaaccagagattgcatatggtgagttcaaaagttcaatatagctcctttaaacatgaaattttatgaatatgtgttcagttagaaagatcaaaaactttatatagtgattatatgaatacaacattccatgtgatcccctgaaggaaaatgccatcgatttttagcattaacatgcaaagtttttattcctcagcaaagaaatgtgattttcattataaataatagaagtgacatgtatacccagccaggatactttcccacaatagagctttttcaattacaggcactaaaacatagtcaaagggaacttttgagaagccacagaggtataagatttcagttctgtactcttccaattgatagaccagaggcagaggcaaaggtgatttagggggcttggtttttaaaaaaatatcttcagggtaaaaatataaataccaaataatttttaatatattcaagattgcaatccatgtttgagacactctccatttgaaaaagcaaatctcagtgcttctagttgtccagcgcttagagctaaattagtgttcaagtacagttgtagccttgtctcagttcctgataaaattagctcctttgttatctattcagtttttgatgtttattgctggcattttttgagagagagagagcatattgtacactatctcaaatcattttttcattttgaaattggaagggtggagccgggcgcagtggctcatgcctgtaataccagcactttgggaggccgaggtgggtggatcacctgaggtcaggagtttgagaccagcctggggcaaacatggcaaaaccctgtctctactaaaaatacaaaaattagccaagcatagtggtgcgtgcctgtaattccagctactcagcagggtgaggcgggagaatcacttgaacccaggaggaggaggttgcagtgagccaagatcgtgctactgcgctccagtctgggcaacaccagcaagactctgtctcaaaaaaaaaaagaaagaaagaaagaaagaaagaaagaaagaaatttgaagggtgttatttataaattaaaaaaataaacacagccaatttggtactttgtgtttagcaacagcttccataaacagtttctcattgcaatggaaagggttctcattcttacggaaagggtctcgtaagaacttcatgagggctgggtgcggtggctcatgcctgtagtcccagcactttgggaggctgaggcaggtggatcactttgagctcaggggttctagaccagcctgggcaacatggcaaaaccttgtctctacaaaaaatacaaaaattagctgtgcgttgatggctcatgtctgtagtcctagctacttgggaagctgaggtaggaggatcgcttgagcctgggaggtggagattgcagtaagccattgcactccagcctgagtgacagagtgagaccctgtcaaaaaaaaaatgtaacagagtattatcactatttaccagtgaagaaactgaggctcagggagattaaataatttgctcaaggtcatgcagaaagcaagtaatagaattaagatgcatcctgatctccagtattttttccatcgaagtctactgaattctcttaatagtaattcaggcaacagaataagttttatatggttaataacttttctttctttgaatttatattgattttggaaaaaaaaaaaagctaaaaagctgcctgactcagcctaggcccactgcagtttgttaaatacatgaagacttgagaatactatattgttttaacaaacaaaagttccactaaattatttcttccctccattttagaactattttaaatctaaaatatcagaaatctattttaacacagagaataaatgcaatttgggtttattgtgttgtttcaagaaaagacttcgctggctttttctggactacaagccagaataacagaatagaaacaaaattaagtagttctctctctgtacccaggcccacatagtaagtacattgcccatgtccattataaagacttatgaatctgaaagtcagaacacttttcatgcattttaagccactaatttacatagcccctggttctgccatgatgagttcacctagctacctctcaatcagtcaatctatatctgggatagacttaaagacttgagggatatctagaatgaacaaatcttttaggtcactaatttcaaaacaaaaaatagatcaaaagcaaaaataaaataaatctctcctgaggccacatagaaagaatgggtcccttcaagctggtctttccagacctgaggtcaagcacattatgcatcaaacattgatatctgaatgaagggaaaacaggattgtaggcagctcttgttaggtagttgccaagcaagggtgagtgagaaaacagaatcatcctaaaaaccaaggattaaagccagtggaactatatgaggaagcaaagcaaggaaccaagaaagctcacatggtagacctgaatgagagataaggcctcctctgtggccatggagaagagaatgaaggggctcttcaaaagatgcccatgggcatgactccactcatcttaaaggatcagcctctgaacttaacatctaacaaaggtttatcttgtttgtttgttttatgtgcttctgttattttattaaatatgtctcttattctaatcagcctgttctataacattggccagggctaatgattctaatagattgagagattgaatcagactgaggggattggggaaggcttcttggaggaaataagaactataatagtttgccatgcttcatttctcgtgtttgacaaattctggcttctactggacatagcattaatagtattaagactgaattgtttcattgttgtttgtcttttgccagcttataaagttagcatcacatccatcactgtagaaaatgtttttgtcaagtacaaggcaacccttctggatatctacaaaactggtgagaattcattcgttcattcgttccttcattcagcaactatttagtactgactatgtgccaggcattatattaaacacagaagatacaactcaaataagacagagctcttgcctttttaaagcttatattctacttggggagaaacattttttaaagatgttcgtataaatatttctcattgaattcatttttctaaaacttcagcaaaatgtttttttcaattgcgtaattgtccaatttctttttctttacaacttttattttaggttcaggggatacgtgtgcaaatttgctacatgggtaaattgcatgttttgggggtttggtatatagatcattttgtcacccaggtaataagcatagtacccaataggtaatttttcaatcctcaccctctaccctcaagtaggctctgctgtctagtgttcccttctttgtgtccatgtgtactcactgtttagttcccacttataagtgaaaatatgtgatatttggttttctgttactgtgttaattcacttaggatagtggctttatttctgggtgctgtaacctgttccattggtctacgtgtctttttttgtatcagtaacatgttgctttggttactgtagccttgtaatatagtttgaaatcaggtagtaggaggcatctagctttgttctttttgcttagaattcctttggctattcaagttctttctttgttccatatgaatattaaaatgtttttttctaattttatgaaaaatgataggaatagcattaaatctgtaaattgctttggacagtatggccattttaacaatattaattcttcctatccatgagcgtggaatgtttttccatttgtttgtgtcatctctgatttctttgagcagtgttttgtaattctcattgtagagatcattcacctccctagttagctgtattcctaggcatttttgtgtgtgtgtggctattgtgaatgggattacatttttttttttgaaatgacgtttcactctgtcacccaggctggagcgcagtggcacgatcttggctcactgcaaactctgtttcccaggttcaagtgattctcctgcctcagcctcctgagtagctgggattacagacatgcaccaccacgcctgacttatttttgtatcttagcggagatggggtcttacatgttggccaggctggtcctgaactcctaggctcaagtgatccactcgcctcagcctcctgaaatgctgggattacgtgtgtgagccaccgtgcctggcctcatttcgattgatataaattttgcaataagtaggaccataaagctaaattgcaataatatgtttatactaaatttttttctcttttgaaattctatcaaatatttcaagtcctaaaatgcttgattttttttcttttgagacggggtctcactatgttgttcaggctggtctcaaactcctaggctcaagggatcctctctcctcagcctcccagcttgattattactaaccataccctagagtttaaaattctagtaatatttttcaattttgtatttgctttatcaacactttgataattttttttaaatttttgttattttgaaagtttcattgtatgaaacttatttgtgaagttattttatttttttcttcattgatggtcacaattttttaatttgcaggctagttgccattctaatgaaataagtgtttagaactttgatgttgccacagtccaacttttgagcaacattttcatccaatgttcatattacaagcagtaataagccattctctttttactgaaataacaaagtgcttttcattccagaaatacaaattatttgttttatttgatactgattcttgcatagtatcaaaagacattttagactgttctgaatttttcatagcatcggatggttcccaagctacaatttttttattagtatcatttcttctttgttctcctgtagatccaaagatgcattttatgatatttaaaaggaaatgttaagaaacattggcatacttcatctcctcattctgggcccatttttaacacataaattttgaatttttataaatataaaaataccacacactacttacagaagaattgtggcacagtgaccataagccatttagaatcaagggcaaactgtagtttgaggataaggataaattggtatttctccaaagcacagagtgcttagaataggtaaggatatagaagaataaaagtttagttattgttgaagcccagggtagttgcctgttctctcttctgaatatactttaaattttccatgatgagaagcttaaaaaataataaggccccacacagctacactgcttactatgacaggggctgaaatggcagatagtactggtaatgttgctcagatattgacgtaataggaatctacaccatcagggcagcctaagaaatcagcttgaactaatgggtgtacactgaaatttatatcactaatgaaagtttaccatttacacagtttctattatacactatttgccaattggttcagaagtttttcaggacttaacaattaagatgactctgccagaacttaatagttaaatatcagccctgtatatatagcgataaatcagacacagtccatgccttaagaagtttctagtctagctagaaggacagatgtgggacaaaaaattgtgacagaaattcaagtgtaaaagaggtaaagaggagacagaaagatatttaaaacaaagagcatccaggaatattttactggatactgtgagaattgaaggagactttcaagataaatgaaattcaagaggccaacatggggaggaatgcattccaggtaggggaactggctacttgtgagttctttgagaatcccaaaattactatctttgaagttttccaagtctttcacattttgtacttttccacaaagttaacagttgccaaataccaaataattttatattttactatataatgtggagattaatgttgttcaactgtagagaggttcttttaattctggttatataagagtaataataagtacttacatagttcctactatgttccaggcacttttcatgtattaactcatttaatctcacgatggttctacaaggtaggttttattatcatgcccagtcttaagatgagggtctaaggccttatacagataacataaatcattttcccagagtcacatagccaggaagcagcatgcttagagtttaacccaggcagtctggctccagagactgaagccttaaccacatggatatcacggctgtccactagccatgaacctctcaatagccacgaggaaccagaaaacttgagagtttataattgtgacattaaaacatgaatggtataaccttacttgacttgcatgtctctcaggggaagctgttgctgagaaagactctgagattaccttcattaaaaaggtaacctgtactaacgctgagctggtaaaaggaagacagtacttaattatgggtaaagaagccctccagataaaatacaatttcagtttcaggtaagtcaccaatatttttcagtcactgatcttccctccaaaactgagtataatttattcttaaatacactacgtgtttcttatggccctgctcttaaccaacaaaccattttgaactaaataatattaatgtcaagcaaagaatgatttaaaaccatcgtggcagctgaggacttagctgcctgattaaccatctgagtgtctggacctgatgatgaatctgaaagtactcaccggacctcccctaaccaccacaccagctcccttgatagttctcagactgtttgtaaagaggaaaatgtgtaaatatgtattgtattatctgcttttagaaactagtcattgaaatagatgtactttctgcctttaatatgggagccccaggcagctttacaattccttaagggtttgtgaaccctccccaggagaggccggtacagaagagtttggcggacagcctgacccctggggacctgaccacagctgggctcttataaaataaatcaggctgggcacggtggctcacacctgtaatcccagcactatgggaggccaagacgggcagatcacaaggtcaggagatcgagaccatcgtggctaacacggtgaaaccccgtctctactaaaaatacaaaaaaaatagccgggcgtggtggcaggcacctgtagtcccagctactcgggaggctgaggcaggagaatggcgtgaacccgagaggcagagcttgcagtgagctgagatcacgccactgcactccagcatgggcgactgagcaagactccgtctcaaaaaaaaataaagaaatcaaattcagcttttctgttttgtggccacctcacaaacactttgtttcttggtaggtacatctaccctttagattccttgacctggattgaatactggcctagagacacaacatgttcatcgtgtcaagcatttttagctaatttagatgaatttgccgaagatatctttttaaatggatgctaaaattcctgaagttcagctgcatacagtttgcacttatggactcctgttgttgaagttcgtttttttgttttcttctttttttaaacattcatagctggtcttatttgtaaagctcactttacttagaattagtggcacttgcttttattagagaatgatttcaaatgctgtaactttctgaaataacatggccttggagggcatgaagacagatactcctccaaggttattggacaccggaaacaataaattggaacacctcctcaaacctaccactcaggaatgtttgctggggccgaaagaacagtccattgaaagggagtattacaaaaacatggcctttgcttgaaagaaaataccaaggaacaggaaactgatcattaaagcctgagtttgctttcaaactgtgctaaaaagcctgttattttatgctagatcagcttcaaccacacaaagacaggcaaattgagagagatggagaaagtcagcagtagagaaccttaaccttgagcgggcttagcctcagagccctcagcgcactgagaaggtaggtgggtttgtccctgccccctccccgtccattgccctctccatacccctgaagggagaccctctactctctttccctcccttccggcacatgttcatttcccccaggaacctgctctcgccaacaattgctttactaaaagacaggccccagtgcagcaacctggtgaaaagaaactgagtggcggatcgggagacctttctccagccctaaccaggtctctctctgagcctcaatttgagctttataaaagaggatacataacagaagttaatttttaagtgacattttgcagcacttcagatcatattaaaaagctctcgcatatattctcatttaatgtctcaagcctctcacaagattcagaaattattatcattatcatccccatcttacagataagaaaattgagatttaggcctggcatggtggctcaagcctgtaatcccagcactttgggaggccaaggcgggcagatcacttgaggtcaggagttcgagaccagcctggccaacatagtgaaaccccatctctactaaaaatataaaaattagccaggctaatttagcaagcctgtaatcccaggtactcagtaggctgaggcaggaggatcacttgaacccaggaagtggacgttgcagtgagccgagatcatgccactgcattccagcctaggtgacagagtgagactccatctcaaaaaagaaaaaagaaaaagaaaagaaaattgaggttcagaaaagtaaagcagttttcccaacctagtaaggaaaagaattggaaatcaaaccccaagactctatctcagtttaaatacatctctgttccacatcactacatattgcttgttgggttgaattttctaacagtaaggcaggatatagtagaagtttcttagacacagattaaccagccccactgaactatcacaggaaacatgaagatgacctccggatgtaacggtaattaacagagactggaatgcatctccttttgaagagtctgctttttactagttaggtgaagctacacaaggccttgtagtgtgcctttgtaaataacactaagattttccacttccagggactaaggacttatttttctctaatgtcaaagctcacattgtaggcactcccttggcaaaaacaaccaatgtgtcatgttcaagatgcccacactccctgtcagcgaggggtgaggagaccttctccagagcaggcctctcggtgtctcctgtcacttccttgctgggaggagggaaccactggtgctgcttcgaaggcacaggagtctgactgccttttcctgagcactttggcaaatagggcaggccacagtggcctaattaacccacaatgcagctgtcaaatatcaaagaaggttttgtgaattagcctggcaccatttaaaatatctgccagctcctcttcagctaactcctatgcatttgaacatattttctcagtgaggcttttgtgaccctccaaaccaggctgggcccattacccaaccctgcacttctcctccaaggcacttgtgctcttgcaatgatttacttaatcagattgaattattagtttagcgtgaccacactgaaagctccacttaggtaaggtctgagtctgttctattcgccagtatctcctgtagttggcacaatgtcgggcacatcatagggactcaataagtgtttgtggattcccctacagtgtagagaatcagaagacccaagttctagtcttggctttggccctaattggcagtgatttgggacaagcctcttaatctctttgatagcctataaaataagggaattggacactctaatgtctcttttatctatagctaagaagatgttctataatcttatgatgtgaaacaggaaaaaccaaacggcatataagcatccaaatattgggcttatgtatttcattctttctttctctcttttttttttttttttttttttgagacacagttttgctcttgttgcccaggctggagtgcaatggcgcaatctcggctcactgcaacctccgcctcccgggttcaagcaattctcctgcctcagccttccaagtagctaggattacagacatgtgccaccacacccagctaattttttgtatttagtacagataggttttcgccatgttggtcaggctggtctcgaacgcctgacctcaggtgatctacctcccttggcctcccaaagtgccgggattacaggcgtgagccactatggccggcctgggcttacatattttgtctgtaagtatggagacagtgcagagaagtaagctggaagagctgccaaggctttctgtagaaggacactgggatttgggtaggtgggaggtacagggaaggcctttctggttaaggggcaacgcttaaggcaggtttccccaggggtaagcaagatgttcttaggtgatacgatgcacattgttcactttagtggctatatgtttattttaacatgtattttaaaaaagtaattagcacatcaaagccatgatgtaacattttcttccaaaataaatctattttccaagaagtaagtctatttaagaaaaagtattgagtaaataaaagtaagtttattcttagggcaaaaatcatgcagttggcatgcaaatgattgacgtttaagatactctgtcttaagaaaacacgtggaggtctgtgagccaaggttgaggcaagcagccttgctccatatttctcagtgagaaattctggaccaaagtcatgtttagtctttctttccagaccctatgatgctgatgtattcagcaacacccaacaaacatgtattgattggtgactgcaggctaggcccaattctaggtgcttggtaccaagatccctgccattgtggaacatagattccaactgggagagatatgtaataaaaaataaagagaataattaagcaattagtcttggatctcagaaagtgataagagcaatgggaaaaagaaaaagcagactaaaggagactggtaatggtcaggggaggggttgcagttctaaatagggtggccaggtcagggtgggcttcaatgagaaggtgaaatttgagcaaagacttgaaggatgtgaaagagtgagccacatagctagccaaggggagagtgttcctggcactcttggtacatagtgtccggcctaaggcaggagca

SEQ ID NO: 70 - DNA, 32000 bp, Homo sapiens
actaaattttcagcctggggtcttttaggggctcctaaaatgtttggtcccacatccaagtgagaatggggctgtggttagaaactctgaggaaaacatgttttctttttttcccctctacacagagccaaagctgagccaggcacatatgcccaccacctccctttgttggggtgaaattttttctcattcactcagtaaggatgtcacctttcgggaatctttgatctgatttcctgccttggatgaatcccaagtgttattcctcccacttggagccctttacaacccaagctccgggccaccagagaattgaagtttgttccaacacacactgcagcttcagaactcatttccttgtctcaattcaagctttctacaatctctgggaaactggggatttttctttatttttgtgacagttcaaccatcattctaaaagatatttttaagactagcaaaagattattaactaatgttgaatggtaaatatatggaagtttgttatactgttctctctacaaaatatgtttaaaatttcatgtaataaaagtttccttttaaaaaaaattcccgatagagattcacagtgagatatttaggactgaaatatcatgatggctgtaatttacttgaaaatacttcaaggcaggcacagtggctcatgcctgtaatcccagcactttgggaggcaaagatgggaggattgcttgaggcaagaagttcaagactagcctgcacaacatggtgagaaccccatctctccaaataataataataacaaaattagcccaatgcagtggtgtaccagcagtcccagctacttgggaggctgagcccaggagtttgaggaggcagtgaagtatgattgtgccacagcactccagcccaggtgacagagtgagaccctatttctgttaaataaataaataaataaataaataaataaaatactccagagaaaaaaggatgaggcaaaatggaaaaacgttaataattgtaaaatctaggttacacggtatgtgggtgctcgttatactattttgtctacctttatgtaagtttggaaatttttataataaaaagtcaaaataaaacaagttcttagatgttctgtactgggaaggctctctggacctctagtgtactgtattattagaaacaaatttgacatcatgttcagataattacactcacaaagaaagaatctacaaatgactctggccaaattattcaacaactcagaaaagatacgaaatgcctgtgctgtgtaatacaaagttgttcagatccagatatgaacaaataaatttgtgtaagtgggcagttggggaggtaggcaggtcagcaggccagcagaacaacaaaataggtagggatgggcctactgaagtgtcttgacattgagctataccaaatggccccattttttcattgcatttcatggcccagatgtctgctggttgatagtcccatccatgtaatagtaaaatcacacttcctccctcccataggtccagcccctctagttttaggaaggggaagccatctcccagctccagcccaaatctcacctgctctcattcacctcctatttatgcccaagattcagtgtgcccattccagaactcctaggggctgagcttgcctggagccccattgagccaatctctcactacataatcatctgatgcaagtacatttcccaaagtccaaaaattccttctaaactgaaattctgagtgagcattcagcagaatagctcagggtgggctttggcaattcaggtcaaaacactctctaccagattagctgggtgtggtggctaatccctgtagtcccagctacttgggaggctgagccaggaggattgcttgagcccaggagttcgaggctgcagtgagctatgattgcaacactgcactctagcctaggtgacggagtaagaccctgtctcaaaaaaaaaaaaaaaagaaagaaaagaaaagaaaaaaagaaaaaaaaagtcctctcccagtgggagatgaaaatatggaccttctcactcttcattttccagttctatggagaacaatttgaatcagaatgcatacacactcccaagaaggaaccctaattttcagagacagagctgactagacccaaatgttgaaaagaaacatttccctaagttaaattaacctgcaaaaatgacatcctgttatagagaagacatttatacattatgcagaacacttgagcttgtggtctctaatagattccattaaagaattaagtctttggtttatctttgcaaaaatgaggcatccgttgaagtggtttatctttgcgtttacaaggcatccattgaagtgttttttttttttcagaagaaagggatatttgctccaagttcacacattttatgtaatagagtcacactagaaactctgaatttatagtccttcccactcaagagtttagccaattattgggcaggctcccagttcaaagtgtctgggtttccgttcccagcagtcagaggctctgcaagaagcatcttcttccaacatggggcctaggatgggaagcccaccctgagggtcaggcaagaattccacctatcttgggaggtacggcaaaccctacagggcaaggactgtatattctttacgttctattatgatgaaaacttgcatttttacacacctcagaacaaatggaaccttgagtcatgtttctcacatttttatattcagtcaacaaatctttaatgaacatttattatatgccagacaaccgtgttgtgttggaaacacagcagtgaacaaaatagacgttctcatgaagttggcattctaaatagttgactatgtgcactactgaaaattttcctcctctcagaagttggactgatacatgctctggagtaattttttttttttttgagacagggtctcactctgttaacctaggctggagtatagtgatttgatcatggctgactgcaggcttgaacttttaggctcaagtgattctcccacctcagcttccagagtagctgggactacaggcatgcaccaccacacctggctaatatttttaattttttgtagagacagggtctcgctatgttgcccaggctggtctcgaactcctggcctcaagcagtctttctgccacagcctcccaaagtgctgagattataggtgtgagccattgtacctggcttggagtaatgtttttgagcaaagcaaatgtacaggacatgcacagagaggcacagggagcacagagtccctggatgaatgctctggctggtggcagtattgtcacagggcaggctacccaaaggtgagcagaacacatgaggctagacaggtacaacttgctcatgaagagcctcgaatgccaagcttaggagtttgaactttattggaacactgacactaatagttaatgtttactgagtgcttactatgtgctaagagctatgcatgaatcacctcattctaattctcttaactctccacagcaggtcttattatttccagattgctgatgaaaaactgagtcacagagaggtaaaaaaaaaaaaacaaaaacaccctgggtccagagttgtgtgaaaaaattttaacaggttagagttgtgttgtagaaatctggtagccagccacgtgtaagacgaattgtagaaaggagagatcacaaatggctatcataagagaatcactgggaaaaggtaataagaacccaaattagaggcaaggagaacagaaagaaatgaaagaatgcaaagactgactggatgtgcacagcagtgaccgagagaaaggaggtatcacaggtgcctcttagctgctaagcctgggtgtcctgcagaaaggggcagctattatcagaagagagaagccagagagaggcacagatttggtggggatgatgttgagctccgtttgggggtatggtgagtgtctagggggcctgtaggaacccctccagaaaaattctcacaagcatttgaaaatcagtgacttgatctggagaaaaatatagggctggcattacaaacctgccggggtctgcattacagtattggttgaaagtgtggaaattgataatgatagatggttggtagatacatagatagatagatagatagatagatagatagatagatagatagatagatagatagaataaatagcatgatacatggaatgagggaagggctaaggataaagatgccttcatggatgcccacagttaggagaagaaagtagagcccatgaaggaacaactcccagagtttgcagatccaggcaagtatcttgttcagaaaataaagggaagggagtttccaaaagaaaagggggttgaaggtactcagatgctgaggagcctataaacaattgtgactaaaaaagactcaaatttggaaataaggtgtcctaatgaacatttcagaggatggagagagattcttaaagtcagcctttggaagaataactatatagaacacttccagaggccaaactagtgacaatggatcaaaagaattaaaatattgcatatctggaaattacacagctagaaatatgtagaaaagaaacacaaacatgcggtaagatacagctatggagctgtttgtcgaaattttgttaaaacagtgaaaatctgtaaactgtattaatgtccaacaataaaaaatatttaatgagaggcaaagatgctttgattggttataaagataaagaagttacaatactatgtacagtatgatcctttttttaaagggaggcacatatagaaagaactggaaggatatactgtaagaatttcacgatgtttgtttctgggtagtaggatttgacaattataagatctctgttttcccttcactccccccttttggattatctgtattttttataactctgtccaatagacatataatgtgagacacataattttaaatgttctagtggccacatttaaaaagtagaaagaaatagataaaataatcttcttaagatatttcattttactcaatatatccattactatgtgtaatcgatataaaaatattaatattttaaatgttttagcactaagcctgtttaacactaaatgcagtggatattcacatttacagaacatctctgtttgggccatccacttctcaagcaccacattaccgcatttggctcctagcacggctctatgaaataatagcagttaatatttatcaaaagcctactatgttccaggcactgctccaagttcatcaggtggagattataactcattaggtctcaataactccatgaggttgaacttattgtgctctccacaagcacgtgttgcttgcccttgtcctcataccataatgaaatgtttggagcttttgcaaaagccattttcctaatatgatgggcatccaagtctggttgcaaaggcttggatagagggcaagtgagagaattggagagagactaaaaatcattcaagaaattttgtggtgaaaaagacaagtcaaaagactgagagaaacatgaggacagaaaactctttgtaaggcaaggagacataaagatgaagtcaggctgaataggaaagaaggaggtgaaaggtgaaagagagatggctgggggtgtggctggtccaaattctcacaagatctctgttggagaaacattgcctggcttgtgctggtggcgagatgtacatagcagcttcccagctagagggagcagggagtcatggccttgtgagggagacagatggagacacacacaacccccatcgcaggtgaatgctatgaaagaatggggtggagggcttcccagggagatgaactgagttttaagaacgaagttagccagcaaagaagcaaaaggaagaggatatagacttgaggattacatcactggatgactgagccactgattggatgtggaggatgagagagtgatgctttgaggtgattcccaagttctccgcatggacaaaggcagagacaataacttgtactgagtgctctttggagtctgacattgatccagtgcaccacatatgttatctcatttactcctcacagaggtcccgtataacgcttgcaatttcacagatacgcaagctgaggcaaaataattggcccagggctcaccactaataaataggagagtctggatttggggccaggttattccagaaatagagagagggagggaaaacgttaatgtggggccagagccagaacaggtaggctaggctgtatcagcctgggaggcatcgggctattctccaaaaagtgaggctccgggttgcaggagatgggacctccaggaaactggtgggaggctggacaggggcaaagtgaaaggtaagcagcctgaagatgggtgggatgtagtggactccagcgtgaagagcctccagtctctggcagagctcagcagcttgggtgggaggaaacgaagggcagggagcagaaggtggtggggggaacgggttttggttaagatgggcagctgtccagtggtgaagaggggaagtatttgtgtatacgatcagttgtgggggatggtggtagagggagcagtatgagagtctgggaggaacagggcaggggagatggcacaggagaagattggggtgggggtgggggcactgatactgaatccagtacacagaggcaggcttagagaccccctgagggtgacaaattcttctcttaacttgctgcagaggaaacgacaagagaataggtcctaagaggagtgaaaatagaggaaactggccaagggataaagataagcagagctatggaagaaaaggaagaaaattagggaattactggagaggaagctgacagaaaggggcgctgggagaggaaaaggtgagggaggacgaaaacggaactcctatcacccagcgcattccagcaccccctccccctcccccgggaagtctgcgactgcatcctcacagggatggaatgggagtggaagctaggccaggctgggaccccggggctgtcccagcccaaccaagacggtgaccagactcaagttactgatcctccgctgtttcttcatctgtaaagtggagttaatgacagacagctggatgtcaacgttttttgttgtttgttttagagatgggatctccctgtatcgcccaggctggagtgcagcggtatgatcacggctcactgcagcctcgacctcctgggctcgagagatcttcctgtctcagcctcccgagtagaaatgtcagcatttgaatgcctcacaagggaaggtggtgtaataaaaggtctattgatttagatatgaacaagtatacccagagccacacgaatgaaaggaggtggccagtgtagatgcaagtctaggacggtcggtagattccaagcttctctacctgcccagttaaacaagttcgtggcccctggccagcctctcggtgggggtctgcgacagaacgggtgggattcattaccaggctaggagcgcaaggccctcgggccgggttcagcttgctgggctcctgtcttgtctcagcccccagcacttgctctgtcaccgcagagcacaggcccaggcaacgtttacccaactgaacccgcatccctgtgggaaccttgttccaacaaaatcccgtcgttgtctccttccatatggaacgaaaatctccttctgtacctctgcccagctccgcacccccgcccccttagagatacggcctggtcgggtcctggtccccccctcggcggcgcttccacttttcccagactgagggtggggaaaaggaggagggggaagaaatcagaggaggaaaagtcgggaggtaggggagccgggagacaggagagggggaaaataaagagcctgagacacaaacgagaggaaaagaccatcacagaaagctggaaatctccggagaggccagcgagaacccgcgctccccacggattccatcattccttccgaaggcgcctctgcggtgtctcagccgtgccaggccccggggttcccaggacgcggaggagtgctgggtgcggccgcctcgcctccccacccctggccgcccctccccacctcgcccaagggggccggaacggcgtcggcgcgcgggggcttttcggagcagtcgagtggaaaatagactttaacccgctttgtggcggccggggcgccctgagcgctctccaaaccacggctcccggcgctcaggcgggccgctgccaagacccggcctggagtccccgcagagttgcgcggcgcacggaccccgtggccttggggcgtcaggaggcccaacccagatctgcgcgcccaggcagcgctcaggccgctagaatggaccccggcagcggcgaggaagcggaactctctgcggctccctctccgcagtgcgccggcaaggtccaggtcccagcctccccaccgccgcccgcgccctcctaggcctcggagcggcgcctttctgcggcctcgaaggtggggtgggaaagtttggggagtcccggctctcacagcctgtcgtgagaactgcccccggggaattcgtccgccgtacggaaaaactggccggagcagagtcgtccgcggttccgcggtcgcgggtggaaggtgaaggtcgagggaggtcaggctgcttctgcgtgtcctgacggctggcgtgttctcttgagatgggctcgggctacttggccagcttcaatttaagccacagtgtctccgaggccctgacctggtccggcccgccgacacttgagcccccagagcctcagagaaggcgagggggtggatctcccagtgccgaggcccgccgtcctggtccaagccggtcgcggcaccgtgtctgggcactggagctgcttccagccccgcgaacagctggagggtggcagtgggaccgctccggcggcttctcccgcgcagtgccccgcctggccccttgtgaagggagtgagcgtcccctttccagagctgtcccccgtgacatccagaaaacgcgaaacctcaggaacaaggtcgcagcttcagaccgcggcccaggaggccgatggtgggtgagtgggagagtcccggagagcaggggggcagagagctggttttcgggaaaaccaatgtgttggaccccaaacatccaccctccgctcggatccaagttctctgagaactgaaacgacatcccgggacgaatgggagagttaggctgagctacacaccggggaggggagggttggagtttagccccaagcccttcggacgccttcttcggctcccgcgtgggttgagacggcggcacggccaccagactcagctaaagggcggagtcgcgaggagaagccagtggcgaggggaggaggaggcctggatctccccgcgaaggctccagtccggcttttgcctccgactgcgggctccctccccacccgccgtccctcgccccgccccgccccgccccccaccttggggcaggtgagcggcggccaatgggcgagcgcggggcaggtgcccgctaactcgcgcctcgcagcgctgggcggccggggctgggcagggcagtgcggggacaccgggggctggggtcggtcccagcgggactccgaaaggagggagacgagctcaaccctcgggccttactggcagctcgcagcctagcacggagcccgcgcctgtgcgggcgcctggagctgcccgctccgccgcagcagccgccgcgcctggccgtacgctgtggccggaccccgcggtcgctcgctcacacacccctcgccgctccgcgcctggctcgcccgcgggggccgagcgcgagcgggcgggcgggggaggtgaggggtgcgggcgggtgtgcatgtgcctggctgggtgcacaccccgcaaggcggcggcgccaggacgcggagcgctccccagagcccggctgcctcgcacagctcccgcggctgcgaccatgttccagcccgcggccaagcgcggctttaccatagagtccttggtggccaaggacggcggcaccggcgggggcactggcggcgggggcgcgggctcccatctcctggcggcggccgcctccgaggaaccgctccggcccacggcgctcaactaccctcaccccagcgcggccgaggcggccttcgtgagtggcttccctgccgcggccgccgcgggcgcgggccgctcgctctacggtgggcccgagctcgtgttccccgaggccatgaaccaccccgcgctgaccgtgcatccggcgcaccagctgggcgcctccccgctgcagcccccgcactccttcttcggcgcccagcaccgggaccctctccatttctacccctgggtcctgcggaaccgcttcttcggccaccgcttccagggtgagtgtccacgctgtgcccgccgaggcggccggccggcgcccgtgctgcggcgatgcgggggaggctcgggggcgcgcggggctgtttagaagttactgccgggaaggctgcaggtccgcggaggtagattcccaggcagggaagagctgtgcggcatccacccgcgccttcgccgcgtaggtctccctcccaggaaagcaggtggagacctccaggcttttctagaaaatataccagttcggacgcaagcccaggcgcgtcctcggagcctgtgctggccctcgccacagcctgcccaattctctctcccagctgagccagtctcagaccagagtacaactcctcccgctctccctccgcccggcttaacctcgcaccacgcttctctcgcaagtccaccaccacctccgagacctcagccttcgctggcgcgtccgggcgggggaaagtccattcgcgtgccccagctctgggggaagcaagggcagcagggagggcgaatcggagagttaatgttcagtgtggagggcctggctgtcttgggatgtttctcggcaaccttggcccgacttctccaagtcacacgtgcctctcctacccaaggtggggaaggtttgcagtaagcaaactggcttccgccgttgctcgccgccttcgggagggagcccacccggctgctggaataccgaggacagttttcccgggcagggggcgggggcagagggcttttaaggtcgtagccagtccgaaccccggagtttgcatccagcaatcggcttgctaataaagatcctccactggccctacacacacacacacacacacacacacacacacacacacgtttcaattatttgtctttcccggagaaaagagagttgcatttgttggagttcgttttcttccttgaaatttgttggagtttgtttttttcttttctttttttttaaattttattttaaagagtggccttgatttgtacaggcatcactttagtttccagttttattttgttagtgtagaccagaccacagccttgtgagaagggtctatggctcagagctaggtaacccggcttttagagaaacaaatgaaagggacatggctggagcttcggctccaggagctaatgtgacggtctgtagtctaggtctacagtcaattagatgtttggcacagttgtttagataataaaatgaaaattatctcttgacactttgactttcacagaaaaccgctttcccaggtcccgatttgtcaggcaattttttcagtcccacctggccaatagatgctgacctggcagataccacaaaaccagagaatgtaattactagaataagaattgttgtgggtagccttgcctcctctttgaagatttcaaagacttgcccaaatccaaatccgaaaaaacaaaaatgctacaatgtcatctgccttgggcaagagtttctgccacttaaaaataaatgtttactgataacatgaggatatctttaaaattgagcaatctaccctggtcctccgtgggctcgatccgaagcctgggtctcgaaacctggcgcccaggggccgagttgtagttggggcggtgtgtgagcccgcgggccgccgcggccgaggggctggcgggttggaggcttgtggagggataggggctcggaggagagggcggggtcgttcctaagtcctgtggcctccagccgttcagcttgtccggagtcggcatcctgggccgcaccctcggcttcgaatccagcccctgacgccctccgcaccgcggttcctgcctccgggcgccgagggccgggggcgcctggagagaaatccagctccggctctgagcgtctccagtcaggcgaggcggataaatccttcgcaaaaccctcttggaaattgccgccgcttcctgagccatcagtcccagcgggtacgttatcgagtagcacaaacagttggatttttccctcaagaaccgagtctggacgcggagatggagccaagtgtggctgcattttcggacccggaaatccgttgggcactgaaggacttttcgaaccctgtagcgctgttgcttcgcggtccatcgtcgccgctgcagacggatgcgctccccggcggctctacgccctccagtcccggccaggcctctgggctgggagccgagccgtctcgggccctccggcgccgcgttttctagagaaccgggtctcagcgatgctcatttcagccccgtcttaatgcaacaaacgaaaccccacacgaacgaaaaggaacatgtctgcgctctctgcgcagcgcttgggcggcgcggtcccggcgcgcggggaagcggcgtctccgctaaccgaggcgctggaaggggaaaagcgaatgcggaatcgtccaggactccgaaggtcggggccgctcgcgagcaccgaaggggaggagccgacgaagaccaggagtgggccgcatttcggtactgtttccccgagatcaggaactttccgggtctaggagcaacgcctggagggggctgtagagacccagccccccgggacccgcaactacaatgggccggagcttctaaggtcgcctttgttctggcaggaggacggggaatgaggttatctccgccgcctgtcctgcctctccctctcctagccctagggccctccgcccagccgtccggccctgagcccctggccggcggcggcctctccagcgaagactgcggctcgaagactgcagctcggaccccgggtgcttcggatccctagctcccacctccagctccctcattcctgggaatctcttgtgctagttcccagccattgccttgaaggggccctaaaagagtggctgtagaaaaatcggaggggtagggaagcagggaggagaggggtattcatttccctagctccagggacggctataccagtccctttccactttgctaactgtcctagtccgaaactgacagcccgttctcacagcccagaattactgcgtccaaacaggccgcaccctagacccaagtttgttctgcccttgtggtccaggcaagggaaactgaacccctggtaggggtggttcaggcctccttcccacaggtcggggggcggggcggtacaggtacctgtgcacctaaggcatcacccttgtctttgcagaaacatgtagcaattgatctgtttctcaggatgtttggtgttgtactaaacatcctctttctaacagggaaacgtccttattcttttggaatcaaataacctgtcatcacttagcatcttgactcatcctgcagtctcctgcttctctgtgatagggttagaaggacccctgtatttttgcacatgcatgtgaatataccctttaggacacatgctgtctaccacaactggacatgacaatgacctggggccattttctcagtaaggtagacccaaagcaacctagcatccccctaaaataaccagacttgaggcaaaggggcatgtatgttggtacagaagcttgttgccttcatcctctcatctgggtttataaagacaaacacagagcactccaccacacaggtgactgacatataccacataattacaaaataatcactaagtcagagacactggggcagactgcagacctgcttcctcagccccacactgcccttcacacctctgcctcctattcatacacacttacggggctttccacactgcagcctcacttctgaccaacctgggccagcccagcatctgaggccaaaccctgccaatgctgggatgagctaggctttctctctccctctctggttcatttgtccagaggaaaccactgttgggacttcacccaggttcataacaatgttgttttttgaagcaagttattaacattaacaagaagcatttgctttccacccacctttccctggcctacctcactggccccaccccagagactttaatcttccttattccccacctggagcaggctccatatttttctgccctttactcatctctgccagaccacctcccctgaccatctgtctattccactatcccaagtcaaacttctcttcagtcggacctgagggccctagatctgcgccacttgaataatcaaatggggtgtccctcacccatctccctgtgatgtggtcccaccatttttgtggctgcacagatccaaccagttgaaattgataaggtgactggagattattgactgaccccttccaggcactagccccgcaatcctagcaactctgttccacagaaaactccagcaaaaacttggcttctttaggtaaccaaagcccagagacttggaggaagtaaggtcagggagtttccaccaacagagggacaagaacagttacctggagagttttagctacagcatctcaattatctgcttttgattcacttacatagatgtttccagagatgggagatgttaactgaattatccaggtgattgtcttagagcaaagcaacaggtcaaatcaagtccaaccagtagccatctctgaagaaattaattggatcagtcaatcccaacagctaattctgtcaaaataatccatctagggttccgtgtttttggtgcatcaggaggctgttatgtgcccttacatgagaatccatgggtgattttgtcagggcctgttatgagtctgttagcatgtgcaaccaagccagagattgtgtgagggcctagtggggtgttcattgagacaggcgctgtgggtagaggcttgttttggcattgatagtttctgaccccatctcccctaccccagcttcatccagtccagtgttatcccttcctcctgcatgtgggagctgagtccctatgctggccaacatttgctaagggacagtcacactctaaaaatcctatacagtagataggaaaaaagacagtagggaggctggaacatatatttacacacgcccatgcagaaaccaatatatctatatctatatatattagagagaaagatgacatctagatatttatacacatgtttctttagcaagggactattcagggatgaagcagggatgaagcttttcccaccagacagtacttggagtctccagtgtgtgtgttgggatagggggttgggggcttaccctagaggctgggtctctggaccgccaaggcctgggggagagagaggtggagaaaggggaagaaggagcctgactttccacttccaggtgctgcctggaccactgacctagccactggcctatttataccccctgcaagacagagctagagcgtgctggcaggagtttttaatgagttagtagcctgagcattcagccgcaagactagtgcaagcaggtgtgaagggattgctccttgtgtaccttctagttcttgaatctgtgtttggcaaaggtgtgcctagcaccccgctgctccccttatcacgttcctgacccccagccctgcctctaccctgggtcctcttggagggagatgctttgcgaccagttaactgaaagcaaatcgttggggctggcggccagggcagcgcccctgggaaagggcggagaaagagcgccatggacttttcttccccaccccttggcctcttccgctgccccaggcattgtgaatgtgggtccacgcctcgtccggcctgccccatctcttggcttaacagagggatctggagagctgttattccccgcgttcccccgcggagtggctctcgagtgcggggaggtgttgcggaggggagtggacttagggaaggggcggcaaaagggcaaagggagaaatggcgtgtgtgtgcgtgtcaaggaatggagagggcagggcgcttgggagcagggcgcgaggccaggctctgttgggccccggctcacggcgccccttctctctgtctgtacctgcgtgtgttgccgtcggcggcggggccgcagccagcgacgtgccccaggacgggctgcttctgcacggccccttcgcacgcaagcccaagcggatccgcacggccttctcgccctcgcagctgctgcggctggagcgcgccttcgagaagaaccactacgtggtgggcgccgagcggaagcagctggccggcagtctcagcctctccgagacgcaggtaatcacccccggtcgcggcctgccctgcgcccggagcccgggtggaggtgagggtgcgcgggtgcaggagaggccctgagcccgccccagcccagccctgctgggttccaaaaggcccccattccccgcggcgctgcggtcaagcccgtctttagagcctcttcctcgagactgcgtgcagcctgctgagcccgcaggacttttgtcaagcgctaaagacctagcaggaggcagagtaaatgcaaactgtatcccgagcccggctcccaaagctcctcacggggggaccaggttccctggaggaagcgggtcgcctcgggagcgggcagcgcaggcagcaccgaggccactggagctggctccagccctggcattcctgcagcccttttcccgccactgtgtcggggcgctcatagtcctgcggggagccggtccgcactggctttgctgctgttcctgggcaaaactggcggggccttggctgcccaccagccaggagcgtctggggagaaagcccaggtgtcctcagactaccaacagaggggcttaaccagggaggggccagcccctgcttggggcccgagggttgctctgatccggcccaggccggctgatagggctgtggaagccacggtgtgcgcgcgcagagcatctgagtggcctgggcctggtgggaaatagaccccgggtactcaggtgcttctctgaatcactggaaaggctgtcgaatgggagaaggaataaactccaacggcgcctgggcttgaactgagtgaaattaacaattaccgtgtagtgtttttgtaactgatcgttaatttaagggaaaaaattaaagaattagatgaaagttatagggaggtggatttgggttcattgtaagtagactttgccataaataaatgctgcctgggatcactgcataagctcttggtccacccaggtccgacgtgttggagtggggctcagcgaccctcagcctagctgctgccctggaggtggatttcagtctctgcgtgccggccggctcccagagttgcgagaggccggctccgcggtctcccagctacctcccggctgacttttcaccttccgctcccctttcctcctagtctcgaccctactacaccaccgtcccctcccaagtcccgggcagtgagaagatgcccggcatggggggcagccggagcctccctttagcagccagagtaggaagggggcttagtgagggagcccagacccaaacttcatccgcagctttcttcggcggaccttaccctctcctccttcagtggcattttggcatctattgtcgtcatatctgtctgctgccccacttaatctacaaatcgctcacgggtcggaggcaggacccgtgcgttttcagatgtactagctgggctgttctaactgcagggaaaaagcttacaaaacaagagttaattttaaaaacgtttcaaagaaagatgtgtttttaaaaataagttaataaaataacactcccttttccctcctggcagtgttttaaaattattgtttgaaacaaggtgtcagtttaagaatggtgtttataattaacttcatttaaacagtaatatttattaaattttaattgcagaactgtaagaaaacaaaaatggtttttaatcctaccacccacagattaacacttgttgaaataatgtcattgtttttaaactttcaattttttagctcagtgagagcatttttaattaactctctttcaaactgaacctagctgcctgtcaatatttgctcctaacaatgccagttagtaaacggactgattgtttctttcatttttattatgagacatttcaaacatatatttaaaacaaaaccagatagaataacataaacgtatcctgcttcattaactatcaaaactcagggctaatcttcttcccgtctgtaaatgagctgctttttgcatatggtacaacaaaaagaatgaggggaggtttgagcctggggaacctgccgtggcagcctgtccttccaggtgaagaccctgagatggagagatggtttggacagagcttcccaggtgggcaaacacgattttaaatacctgcctccctgctaacttactgtgtaaccctgggcaagtcacttaacctctctgagctctggtttcctcattgagaaaatagttgtttaatgattaaaggtacctcatatgagctcaaataatattaatccccatccctagtcccttccctttaaggtagtatgtcagattagtagcataagaagatccaaacctgtgtgtcctcttagtccagcgttcttcctcccttatgcagtttccgtcatcaacattgcctttctgttgccctcataacttatcatacggagccaggctatataattagctacttctctatccgcctcttggtacttaccaggcaagcttacctgtcatttccagctatcagctatttgtcaagcatcagtcacccccaacagcccccctgccatgcatttctactgttaatatctgtatctgtctccagagctctctaatctgtcccaccccgtagctgttttacatctagccatatacttctgtctgctctcattaaactgcctccccaaaactggctaatttatatttccgattttctattagttatatgttcttcctaacaataagaactatttacccatttgttcattatctttgtcatctattttaccttctgtgtttccaccattcatctcaaacttcatctccatagagctatttcgcaactgacaaacagtatattcatatgtctggtaatggttatctattattggctctggctttgtcttctctctgggtctgggcctcagtttctgtatctgtgagattgaatgacacaaattccagggttttttctagtgctgagtttctgtgactcctctacattctacttctctgtgtttctgtatactacctcctccacattctcagagctcaccacacaacccctgcctatcatgatatgcatcaaactttgttgttattacttaattatctgccatgtccaaacatcaatctgtagaccagcagtatgcgtctctcagggagatcttaaaatacagattcctgggtttcacccaggagattctcttaggaagtccaggatagggtgcaggaaaaagtttaaaaacagttatttgggtgatcatgattaataacaggcctgagcatcttagctctgggaggcagaggccaagcctgtctgtttcttacaggacccagctcagtgcccgggatggagtacatgctcaataaacatgtattgaattaatgagcacatttctctttgcccatacaaatacacactaactttatcagtcattccccttgctctctgctgtcattgctccctccctgtccctctccttctatctttcccttgtactttcacagctgattgttgatttagattatgcatataccagtttgtggataaaacttctcggagggttactcagatcagtgtgtgaatgagctcttaatccagatctcagaagtctgtgcactccccaagctttagccgggtgctaggaggtgggcaacctgggtgactctgtgtgtttagtgggagtggggtattcgtgctgggatggccagtgcctcaatctaggagatgagggaagagccctgggcaagggctagttctcccttcaggttctaatgacttgttcctcactgcttgggtgccgccctggagtatgaccaggaaggtaccagtctaagcttcagtcctggtggctggttgggcagacctgggcctgggtcattgcagaggctcaagtttaatgagtatgtgtaatgggtgtgtgcaacatgtgtctgcccatgtggggcaccaacgggctttatgtgattgatgcccaaaggtcagatgatagcataggtacacattagatgccattaggcagtcatatgacatggagtgcagcttgcatgcttttgtgtgtgttcgtgtgtgtgtcgggggcaggggtaagttagttttagggggagtgagagaaagcacctggttgctccaggctgatcaactggtcagtgtttccagctactccttctgctctgaacagatcagcaggtgtttcttgaccttgcctgggttagagtttagctgagcggtgaaggcaaagggtacagaaacgtggcctgtggctttgaagatttcttactgagtgatgaaggctaagtgcaaagcttgcacatttgtgaaacatgcacaggaagaatgactagggtcccctttgaggtcacagctgtgggctgaggggtgtcaggatagaaacgcttgagaagatggctccaggaggcctcagacctggaagacttggggggatgcctaggatcctaggttggagggaaagaagggcagggtttgaggcaggcagatgaagatagagccaccatcttggagcccaagggcagggagatcttgggaggcaggagttacggtcacctgcctatggctttttcccctcagaggcatggaaaggaggatttggagggtcctttcctgctctggaatgttctggccttagagggatggataagagggggatatccaagtgacctgaattttagggaaaaatcaagagacatttgttcctagctcacggtgtgtccacatctcttctctaagtcttggcttttcttcaagaacttctgcatctcatgttccaggagtcctgtgtgggaggatgagggggagataaaggagattagagtggttctgtgaggagctgggaccaacatgtcctgaggtgaatcttatgatgtctccctgagagagacagaggaagggtccaggctgggctgaaagaggaggagacagggaggcttagggagatcatggttatggttggtggggagctggaggtgacctcagcttactgaggtgaaggttgaacttagcatggcattgattgggcttgaccttgagagtgggaacagcccacatgatcaaatgataggaaatgggtccccagggaagagagaaagctgaggggtgacttgactgatatctccaggctcctgtccattctgggatatttgaaatctttgaagacaggacacgtattcacctgaaagtgtgcaggggcctggagccacagacttttccatttgcaggagtggtgaaaaagaagggatccagacctcgttcattcagaatagcagattattccaaagtaaagtctgattagttctgaaatatcggctggagccatagtttgcttgtttgttagttcatttttccctttgttcttgcatgcatgtcttcatttattaatgcatacattgatcagtcctctagcaaactgatacattcattcatccatagcagtttcaccttcttcattctgcctgactcaagccaacccttcttctgcccagcagtaggtgtccctcctccaacttcccctaaaagtggccaatccaatttaccatgtggaatattaaaaactggccctcttgcaaaagtgtccacaaaactaagaaaaagatccagtttctccatcattgagcacttctcaaagcctttgctgattagaattctacccctcttctgttcattttctcctgttttccaggtctggcccaggtacctcttgcctagagcataggcttgtccagccagatgactatacatggaacatgtcctctgggcagggcactgggactaacataacagtttggctctccagtctcatagtctggtgaggaggcagacgtaaataaataaattagtgcacagtgggggtcactgttactgagactgggaagaggtactaaggaactacaggcaggtgatggggcaggaccattaaggaacatcaggacagggtcttgaaggctaaggagagtattccagggttggtaagtcaggagaatggagacttttggaaggatgtggcctctgagaaactgagatgttcacttcacagtgaaatgaggacttgggagaccacaagggacctcttgctacagcagagaggtcagagtgggcaaggggtcctccagctaacattccaactgtacctcggggcttagagagaggtgagtagtgtgtttgtgttggggatggggaggcatgtgcaggacagatccagcctccaagccataccatatgacccagctcctttccagggcctgttttctctagggaaggggctctgaaggatccagagttgcctggctgggttggagaggtcatgaaatgtcactctcatctcctaatacactcagagcccagttccttttctttttccaagtaaaaaataactaccattatcaataatctattaaggaaaattcagaaaagtagaaagaagaaagaaacatcacccacactttaggtatatttccttctagtcttttttccccgtgtgtagattttgtttttctatggttgtgatcacactgtgccagccttgtgcatcctggcgtttccattaatgctatgaagtcataagcactaccctgttattgcagtctttgtaaacagcatctggacactcagcccaaggctgttctccggaagatggccaggctgcacagggagagggtttatgtccctgcctctagagagatgcctacttgaccccagtatttttcatggagaaaatattcagaatcacctttcacttgggtgccctaggaagctgcctctggcctatcctgtgcctgaagtcgccatccaaagctttccttctttgagccagtgttgctagtcaagggcagcatgctgggcccgtcccactacaggccaatgtgaccgtcagtctccttcctgaaggacacttggaaatgcatgtggaaagaggaaggtacagaaaagggcccccggtccctggtactgcccgcatcacctgacagtcaccttcggccagcccacttgggcttctcaggaatgacaccccggccctgcatctggccctgagtcacgcacaggaggcagggtgagctcacccgcccactgactggcacagtcatagcaggctccagggtggggggcaggggccaggctgctgccaaatggttgtgctgagaaccacccagggtccaggtggccctgcgcccaaagataggtgggcttggagtccagcagcctgtgcccagagcctctgccatcctccacggccggcctaggtgagatgtgcaggctatgggcttggaaatgaggggagaatccccttgccctcactccatccatcgaggccgggcaccaacccttcctgggccagctttccagcccctggctggctgctctgcaggcactgaatgccagctgcccccatccccatgccagtgctctaaaatcagtgctctcaaacaagggcagatggcgcagtggaagttctggcaagaggggactgtgaggggaagtcctggggtaggtgggacagagaggactgcctgggaagggtgtaggggcagcacctcctgggcatgaaaccatctgcagggcacaggggccaggcctgcctctgcatgcactgcttggccttgtggctaaggcctgtgctttacccagttctctgggagcaggagcagtctttctgaggcctgccctcagccctgcccagggttcaaggatctctcctcagcatcattgctgctgccaaaaccaagaggctacccaccattcctcacccgcaactctgccacgcagcaccgtctgcacagctgcagttggccacatccacttgcttttaaatgtgctgtcatttcctggaaaccatccaggccttgtagcctgccctctgcacctcctccccaaggggggcctctggagcaagaatccaagaggtgccctggcagctgcaagtgtccccagaacatttcctctatgcatgaaggactgaagcccagagggggaagggacttagctgagaatcagtacccaggatcctcctgccaacgctgaagatggtttgggtctggcctgactctgcaaagccaagtaaagaaccacggagtcagggagagttgacagatgaaggctttctccacagcccacaagcactaagtccagtccaggagccaggatgagcctcccagattatgcatgagaggacattaagggctgtgtcctggacactgaacagatgctggaggaggagggaaaagaggcttcctggaggagatggcttagaaccatagacctgccctctgcctcatgcctcctccatcatggaggatggttgtccagtttctgtttgaaccccaccccataccttgccagggctctcactgccagacacagaatagggggctccctgggttcaaagtagagctcacttctgtcccctgggcttctcctgactgttccttgtgtgacctgttcccacatctggatgggctgcaggagccagtgctgtggggacagaaggtctggagctgcccgtgaagggcagaatgctgccctcagacccgcttcctccctgtccttgtctgtccaaggagaatgaggtctcactggtggatttcggactaccctgaggagctggcacctgagggacaaggccccccacctgcccagctccagcctctgatgaggggtgggagagagctacatgaggttgctaagaaagcctcccctgaaggagaccacacagtgtgtgaggttggagtctctagcagcgggttctgtgcccccagggatagtctggctgtccaggcactgctcttgatataaacaccacctcctagttatgaaaccatgcccattctgcctctctgtatggaaaagagcatggggctggcccgtggggtggtgtccactttaggccctgtgggagatcatgggaacccacgcagtgggtcataggctctctcatttactactcacatccactctgtgaagaagcgattatgatctctcctctagaaactcgtagagtcccatgtctgccggcttccagagcctgcactcctccaccttggcttggctttgctggggctagaggagctaggatgcacagcagctctgtgaccctttgtttgagaggaacaggaaaaccacccttctctctggcccactgtgtcctcttcctgccctgccatccccttctgtgaatgttagacccatgggagcagctggtcagaggggaccccggcctggggcccctaaccctatgtagcctcagtcttcccatcaggctctcagctcagcctgagtgttgaggccccagtggctgctctgggggcctcctgagtttctcatctgtgcccctccctccctggcccaggtgaaggtgtggttccagaaccggaggacaaagtacaaacggcagaagctggaggaggaagggcctgagtccgagcagaagaagaagggctcccatcacatcaaccggtggcgcattgccacgaagcaggccaatggggaggacatcgatgtcacctccaatgactagggtgggcaaccacaaacccacgagggcagagtgctgcttgctgctggccaggcccctgcgtgggcccaagctggactctggccactccctggccaggctttggggaggcctggagtcatggccccacagggcttgaagcccggggccgccattgacagagggacaagcaatgggctggctgaggcctgggaccacttggccttctcctcggagagcctgcctgcctgggcgggcccgcccgccaccgcagcctcccagctgctctccgtgtctccaatctcccttttgttttgatgcatttctgttttaatttattttccaggcaccactgtagtttagtgatccccagtgtcccccttccctatgggaataataaaagtctctctcttaatgacacgggcatccagctccagccccagagcctggggtggtagattccggctctgagggccagtgggggctggtagagcaaacgcgttcagggcctgggagcctggggtggggtactggtggagggggtcaagggtaattcattaactcctctcttttgttgggggaccctggtctctacctccagctccacagcaggagaaacaggctagacatagggaagggccatcctgtatcttgagggaggacaggcccaggtctttcttaacgtattgagaggtgggaatcaggcccaggtagttcaatgggagagggagagtgcttccctctgcctagagactctggtggcttctccagttgaggagaaaccagaggaaaggggaggattggggtctgggggagggaacaccattcacaaaggctgacggttccagtccgaagtcgtgggcccaccaggatgctcacctgtccttggagaaccgctgggcaggttgagactgcagagacagggcttaaggctgagcctgcaaccagtccccagtgactcagggcctcctcagcccaagaaagagcaacgtgccagggcccgctgagctcttgtgttcacctgcccttctgtttgtcccacttgtcaggatgaaggtttcctgacaagcaaatctgcattcctaagtctttcccttacgacatccagacccctctctttcttcttcacctcccatgtgctcatgaaacctctgctctttggcctccatgccaccattctgccggtgctaatgacagtcaccaaccacagtcactggccacccccttgtggccaaactcaaccacttcctgttgggttcacctgctccctgatctgttggctatgccctcctggattctcccaccccgctctgccttcatttcggtagctctgactcctccttcagcctgagttcattcagtgtgatccatgccttgtcacctctggccacccccaggtcagtccttgctctccctgactcctcattatgtcctttgccttgtggggatcacatccacttccaggacttctctttggctccctggcctgtgtctttagctgacctctgctgagctgcagacccgtcaagccagctgcctgctccaccccctgcccctcagcacctcaaagcccatacatccacagccggacgcacctacccatctgtgcttctccaggatcacccacctcgacaaacagcattagacatgtacacagtttcccaagctacaggaaatctgggaatcttcctcaagcttcctctcctcttccccagccccatccattcccatctagtgggttgagtctagactggcttcccaaccacacctccctaatgcagcaccccctacccccctgcccagctccctctgccaccggcctggcctgggccctgctcctctagggaggtttctgtgaatgtcaaggatgaggtccacttcaaaggaggccctccatgttgcagctaggtttctcttccttgcacccaaacagggcagactcacccccttctgagcccctttgccccatcttcttgccttgctcccggtaccctttgcttcagcatccccatccctgtccctgagtgagccacaggttttccctgtgctgtgccttcgctcatgctgttcttcccacctggaatgtcgggtgcttgatcaatgtggaactcactggaaagatgtcagagacccagccttgctgtctgggccacatgcagggatccaagcacacaaggtccttctgctgggagcacagacccaggtcccactcgcactctcagcgtctctctcccacctctgcccacctcacttgtgtccagtcagtgctagaaaccaaagggctttgtcccatcccaacaccccctctccctccatcagtcaggaatgcattctgcacatcttgaaagtcctaacatggataagtccagattaacccacatggcgaccctcactgccaagcaggtgggatcacttctgggagcacacatgcccaggtgtggaaggaaggtgggaggaagagtcatccttttggccccagtgggggacagagaaaggggtgagctgttcctctcaagatcctgcctcacttggtagggggagggggtccaggaagatcacagcagagcaccccctgtcatccgaataaagggctggaagggacccaaggaaacctgccagtctcccgaggccaggcctgcggggggcggggcggggagtccctgccgcactcccatccaccccccatgttgtgcctctccctgcagacggtaaatattggtgttgtgacttcattaataaaggcttctgtgagcctgaaaaacatggaatcaggatgaactattttctgagctgcgggcttgccaggtttgctaatttgggagtttttgggccctctccagggaacaaaccaaagtctctcttgaagagacacagatgcagccgagaagggaagaagacgaggactgctgctcccttccctcccccaacggctcctcccacctggagagcgggtgccctgcagagggtgaggaccagcagacactggcctgctggtgcctcggcgtgcaggtgctgcatggccagcccttccctgagggagcctaggtcagccattcccttcagctgggctggcctcccagggcctgcagatcgcgtgggctgaggtatcatgagcacctgtaggagctccaaattgtacgcagctgaagtagagggagctcaggggacctgttctgaaccctggtggcctaatccacacgcctcaccttcagggactgatctttgcacatcctcttgtccgtggaactttccaggactcatccccatggccttcgcagcagtatggctcacgctcctagcatctctgcacttggtttgcaccaactcctcctcacacgtgctgggaccgcttcccaggaggcatcaaggcgctctggctaagtgaaccgggctctgcccagagggagccggccagggcccacaggcctctgctgtagccctgctccagggcatccctgcaggcaaggggagaggaggggaggggcggccagcaggctgagcggtgcaggcccagccagctttcctgtcagacgggcgctgccaaggcggagccagacatcggaacaggtttaaccaattacccgagcgccccatctgctgtctggggtgtgtgtgagggtgagtgcatgtgagggtgtttggagtgtctgggagggctgtgggcgtgcgtgtgagtgtgactgtgtgggtgcctgtgggcgttcggctgtgcatgtgtgcggctgtgcacgtgtgccgtctgtggctgcatggcccggtcatgccccctgatttgttaaaaactggctacggcttacagtcttcctgtcccccagaccttggggtctgtatggacaacccacctggcatcccagcctctcattccctcatcttcccctcaccactctctctcagggatgatcagagcccagaatggggccttctctcaaatcacacattcaggtgtcttttcccgtcgaaccctgagctcttcccatttgctggctcactcctttccctctgcagcagtgcgggaccttgcgggggcccccaggccacaacctcctctgctctctttctgacacatccttgtcccactattccttggttgcacctgcctggcagaattgaaaccctgcttgaacctgcttttccacctgcccgtgcagttgagtccatgaggacagcaggcaggcgtgcgggatggcgcccctcattgtttcgggtcccagcctcagctgaggcctcgccctattgagaagtcctctgccaccctccctccaagcctctcttccccctgactcagcagagggccttactcccaccttcagagacagccctggaaggggacacctttgtatcagtcagatggtaccttcagatagagcacttggaggacagtttactacaggaacaattaaattttggggagcccacagggatggtgcagtaccccagagctggtaataatggggagcccatatggccctgaggcctgaagaggaaggaggcaggggcagctactggaacctggaggagacagctggctggagagggcccccaggtaggagccgtaaccttcagtacagaggggcccagagatggcaggagggaccaggaggaaaaaatcccccagcgtcactcctccaatcccccagtttcctgctgggactcctggtggtggaagccagccagccagcccttagtcagcttccagggacagagcaggtggacagatgcagaatggatctggaggggtgggggctcctcaccctcaaccccacgctgcctgcagccagcccttcctccccacctgcctcctgtcaccacccgccactttctctccttctggcccaggagaaccccacccctaacccccacctccaacctgggcttcagagtctccccacctggagcggctcactgctaggctgttcttcctctttctgcgacacagtctcttctgattcttgcctgaggggtccaccttctaagcgcctcttcagctccatctctcaatgtcccacttctgcccatcagccaaatttcttgaaggaattagctatgccggctgtccgtggtagtcctgacttctcgacccgtgaagatctgtcttttgccctgaccacatcccactgaggctcctctctctgggtcctccatggggcccgccttggtccatgtctcccttcacctctcggcctcagtgaagcacatggaagccccttctacctgaagcactcccatcgctgtcctctggaatgccacgccctccctgccttcctcgcctcttgccttggtgtgctgggccgccacaacaaagcacctcagactgagtggcttcgacaaccaaaatttatttcttcccagcattggaggctgccagcccaagatcaggggttagcagggtgggtttcttctgaagcctctctccttggcctgtggacagtgcctttgtcttcacaggagcttcttcctctagcatgcctgcagcccaatctcctcttcttaaaaggacatcagtcattttggattctcctttggatgagagtccaccttaataaccacattttaacttaattacctctgtaaagaccctgtctccaaagacagtcacattctgaggcacagggcattgggacttcaacagatgagttctgggaggacgtggttcagccctcacacctcccttatggctgagcttccttgtctctgcccaggcctcagaggtggggctcctcagagctccttccacctgggtggccatctctgctcctccagctccagatgctccctagacgtggataacagacacatccacatttcccatccctacctgtctcctgagctccagacttcctcgtctcttggtgtccacttggttatctcccaggaacctccgatgccttggaaatcagaatgcatcccctttcctgtgggtttgttcttccttctctgtgccttagctcagaaatggccccttctctgctgcctcaggcaggaacctagggtcaccccttacttctctctgccaccctcacggagagctgagcagtcctgaatcttcacttctctccttccccttccccat

SEQ ID NO: 71 - DNA, 40 bp, Artificial sequence
  Synthetic oligonucleotide
  misc_feature (1)..(12): bases at these positions are RNA
  misc_feature (14)..(40): bases at these positions are RNA
cuuaauuucuactcuuguagaucugaugguccaugucugu

SEQ ID NO: 72 - DNA, 40 bp, Artificial Sequence
  Synthetic oligonucleotide
  misc_feature (1)..(5): bases at these positions are RNA
  misc_feature (7)..(9): bases at these positions are RNA
  misc_feature (10)..(40): bases at these positions are RNA
cuuaatuuctacucuuguagaucugaugguccaugucugu

SEQ ID NO: 73 - DNA, 40 bp, Artificial sequence
  Synthetic oligonucleotide
  misc_feature (1)..(5): bases at these positions are RNA
  misc_feature (7)..(40): bases at these positions are RNA
cuuaatuucuacucuuguagaucugaugguccaugucugu

SEQ ID NO: 74 - DNA, 40 bp, Artificial sequence
  Synthetic oligonucleotide
  misc_feature (1)..(6): bases at these positions are RNA
  misc_feature (8)..(40): bases at these positions are RNA
cuuaautucuacucuuguagaucugaugguccaugucugu

SEQ ID NO: 75 - DNA, 40 bp, Artificial sequence
  Synthetic oligonucleotide
  misc_feature (1)..(7): bases at these positions are RNA
  misc_feature (9)..(40): bases at these positions are RNA
cuuaauutcuacucuuguagaucugaugguccaugucugu

SEQ ID NO: 76 - DNA, 40 bp, Artificial sequence
  Synthetic oligonucleotide
  misc_feature (1)..(14): bases at these positions are RNA
  misc_feature (16)..(40): bases at these positions are RNA
cuuaauuucuacuctuguagaucugaugguccaugucugu

SEQ ID NO: 77 - DNA, 40 bp, Artificial sequence
  Synthetic oligonucleotide
  misc_feature (1)..(15): bases at these positions are RNA
  misc_feature (17)..(40): bases at these positions are RNA
cuuaauuucuacucutguagaucugaugguccaugucugu

SEQ ID NO: 78 - DNA, 40 bp, Artificial sequence
  Synthetic oligonucleotide
  misc_feature (1)..(17): bases at these positions are RNA
  misc_feature (19)..(40): bases at these positions are RNA
cuuaauuucuacucuugtagaucugaugguccaugucugu

SEQ ID NO: 79 - DNA, 40 bp, Artificial sequence
  Synthetic oligonucleotide
  misc_feature (1)..(21): bases at these positions are RNA
  misc_feature (23)..(40): bases at these positions are RNA
cuuaauuucuacucuuguagatcugaugguccaugucugu

SEQ ID NO: 80 - DNA, 40 bp, Artificial sequence
  Synthetic oligonucleotide
  misc_feature (1)..(9): bases at these positions are RNA
  misc_feature (11)..(40): bases at these positions are RNA
cuuaauuuctacucuuguagaucugaugguccaugucugu

SEQ ID NO: 81 - DNA, 40 bp, Artificial sequence
  Synthetic oligonucleotide
  misc_feature (1)..(29): bases at these positions are RNA
  misc_feature (31)..(35): bases at these positions are RNA
  misc_feature (37)..(37): bases at these positions are RNA
  misc_feature (39)..(40): bases at these positions are RNA
cuuaauuucuacucuuguagaucugauggtccaugtctgu

1. A compound comprising a modified crRNA consisting of 35-45 linked nucleosides.

2. A compound comprising a modified crRNA, wherein the CRISPR recognition portion of the modified crRNA consists of 17-20 linked nucleosides.

3. A compound comprising a modified crRNA, wherein the target recognition portion of the modified crRNA consists of 18-23 linked nucleosides.

4. A compound comprising a modified crRNA, wherein the modified crRNA comprises at least one linker nucleoside.

5. A compound comprising a 5′-stabilized modified crRNA.

6. The compound of any of claims 1-5, wherein the compound comprises a stabilizing conjugate group.

7. The compound of any of claims 1-5, wherein the crRNA comprises at least one linker nucleoside comprising a stabilizing modification.

8. The compound of any of claims 1-4, wherein the modified crRNA is 5′-stabilized.

9. The compound of any of claims 1-8, wherein the modified crRNA is 3′-stabilized.

10. The compound of any of claims 1-9, wherein the CRISPR recognition portion of the modified crRNA binds to a Cpf1 nuclease.

11. The compound of any of claims 1-10, wherein the target recognition portion of the modified crRNA comprises at least one modification that increases affinity of the crRNA for a target DNA or RNA.

12. The compound of any of claims 10-11, wherein the CRISPR recognition portion of the modified crRNA comprises at least one modification that increases affinity of the crRNA for a Cpf1 nuclease.

13. The compound of any of claims 1-12, wherein at least one nucleobase of the modified crRNA is thymine.

14. The compound of any of claims 1-13, wherein at least one nucleobase of the modified crRNA is a modified nucleobase.

15. The compound of claim 14, wherein the modified nucleobase is 5-methyl cytosine.

16. The compound of any of claims 1-15, wherein modified crRNA consists of 35-42 linked nucleosides.

17. The compound of any of claim 1-15, wherein the modified crRNA consists of 36-40 linked nucleosides.

18. The compound of any of claims 1-17, wherein the modified crRNA comprises at least two linker nucleosides.

19. The compound of claim 18, wherein at least two linker nucleosides are linked to the CRISPR recognition portion of the modified crRNA.

20. The compound of claim 19, wherein at least two linker nucleosides are linked to the 5′-end of the CRISPR recognition portion of the modified crRNA.

21. The compound of any of claims 1-20, wherein the CRISPR recognition portion of the modified crRNA consists of 18-20 linked nucleosides.

22. The compound of claim 21, wherein the CRISPR recognition portion of the modified crRNA consists of 18 linked nucleosides.

23. The compound of claim 21, wherein the CRISPR recognition portion of the modified crRNA consists of 19 linked nucleosides.

24. The compound of claim 21, wherein the CRISPR recognition portion of the modified crRNA consists of 20 linked nucleosides.

25. The compound of any of claims 1-24, wherein the target recognition protion of the modified crRNA consists of 18-22 linked nucleosides.

26. The compound of any of claims 1-24, wherein the target recognition protion of the modified crRNA consists of 18-20 linked nucleosides.

27. The compound of claim 26, wherein the target recognition protion of the modified crRNA consists of 18 linked nucleosides.

28. The compound of claim 26, wherein the target recognition protion of the modified crRNA consists of 19 linked nucleosides.

29. The compound of claim 26, wherein the target recognition protion of the modified crRNA consists of 20 linked nucleosides.

30. The compound of any of claims 1-29, wherein at least one internucleoside linkage of the modified crRNA is a modified internucleoside linkage.

31. The compound of claim 30, wherein at least one internucleoside linkage is a phosphorothioate internucleoside linkage.

32. The compound of claim 30 or 31, wherein each internucleoside linkage of the modified crRNA is a modified internucleoside linkage.

33. The compound of any of claims 30-32, wherein at least one internucleoside linkage is a neutral internucleoside linkage.

34. The compound of claim 33, wherein at least one modified internucleoside linkage comprises a methoxypropyl group.

35. The compound of claim 33, wherein at least one modified internucleoside linkage comprises a phosphonoacetate.

36. The compound of claim 33, wherein at least one modified internucleoside linkage comprises a methylphosphonate.

37. The compound of any of claims 1-31, wherein each internucleoside linkage of the modified crRNA is a phosphodiester internucleoside linkage or a phosphorothioate internucleoside linkage.

38. The compound of any of claim 30, 31, or 33-37, wherein at least two internucleoside linkages of the modified crRNA are modified internucleoside linkages.

39. The compound of claim 38, wherein at least two modified internucleoside linkages of the modified crRNA are the same as one another.

40. The compound of any of claims 1-39, wherein the modified crRNA comprises one to five contiguous phosphorothioate internucleoside linkages at the 5′-end of the modified crRNA.

41. The compound of claim 40, wherein the modified crRNA comprises one phosphorothioate internucleoside linkage at the 5′-end of the modified crRNA.

42. The compound of claim 40, wherein the modified crRNA comprises two contiguous phosphorothioate internucleoside linkages at the 5′-end of the modified crRNA.

43. The compound of any of claims 1-42, wherein the modified crRNA comprises at least one linker nucleoside that is linked to the CRISPR recognition portion of the modified crRNA by a modified internucleoside linkage.

44. The compound of claim 43, wherein the modified internucleoside linkage that links the at least one linker nucleoside to the CRISPR recognition portion of the modified crRNA is a phosphorothiaote internucleoside linkage.

45. The compound of claim 44, wherein the modified crRNA comprises two linker nucleosides.

46. The compound of claim 45, wherein the linker nucleosides are linked to each other by a modified internucleoside linkage.

47. The compound of claim 46, wherein the modified internucleoside that links the linker nucleosides to each other is a phosphorothioate internucleoside linkage.

48. The compound of any claims 43-44, wherein the modified crRNA comprises more than two linker nucleosides.

49. The compound of any of claims 1-48, wherein the modified crRNA comprises one to six modified internucleoside linkages within the target recognition portion of the modified crRNA.

50. The compound of claim 49, wherein the one to six modified internucleoside linkages within the target recognition portion of the modified crRNA are contiguous.

51. The compound of claim 49, wherein the one to six modified internucleoside linkages within the target recognition portion of the modified crRNA alternate with unmodified internucleoside linkages.

52. The compound of any of claims 49-51, wherein the 3′-end of the target recognition portion of the modified crRNA contains the one to six modified internucleoside linkages.

53. The compound of any of claims 50-52, wherein the target recognition portion of the modified crRNA comprises one modified internucleoside linkage.

54. The compound of any of claims 50-52, wherein the target recognition portion of the modified crRNA comprises two modified internucleoside linkages.

55. The compound of any of claims 50-52, wherein the target recognition portion of the modified crRNA comprises three modified internucleoside linkages.

56. The compound of any of claims 50-52, wherein the target recognition portion of the modified crRNA comprises four modified internucleoside linkages.

57. The compound of any of claims 50-52, wherein the target recognition portion of the modified crRNA comprises five modified internucleoside linkages.

58. The compound of any of claims 50-52, wherein the target recognition portion of the modified crRNA comprises six modified internucleoside linkages.

59. The compound of any of claims 49-58, wherein at least one internucleoside linkage within the target recognition portion of the modified crRNA is a phosphorothioate internucleoside linkage.

60. The compound of any of claims 49-58, wherein all of the modified internucleoside linkages within the target recognition portion of the modified crRNA are phosphorothioate internucleoside linkages.

61. The compound of any of claims 1-60, wherein the target recognition portion of the modified crRNA is directly or indirectly linked to the 3′ end of the CRISPR recognition portion of the modified crRNA.

62. The compound of any of claims 1-61, wherein at least one nucleoside of the modified crRNA comprises a modified sugar moiety.

63. The compound of claim 62, wherein the 5′-terminal nucleoside of the crRNA comprises a modified sugar moiety.

64. The compound of claim 63, wherein the 5′-terminal nucleoside comprises a linearly modified sugar moiety.

65. The compound of claim 64, wherein the 5′-terminal nucleoside comprises a 2′-modified sugar moiety.

66. The compound of claim 63, wherein the 5′-terminal nucleoside comprises a bicyclic sugar moiety.

67. The compound of claim 63, wherein the 5′-terminal nucleoside comprises a modified sugar moiety selected from among: 2′-O-methyl, 2′-MOE, 2′-F, cEt, and LNA.

68. The compound of any of claims 1-67, wherein the 5′-terminal nucleoside is a linker nucleoside.

69. The compound of any of claims 62-68, wherein the 5^{th} nucleoside from the 5′-end of the CRISPR recognition portion comprises a modified sugar moiety.

70. The compound of any of claims 62-69, wherein the 6^{th} nucleoside from the 5′-end of the CRISPR recognition portion comprises a modified sugar moiety.

71. The compound of any of claims 62-70, wherein the 7^{th} nucleoside from the 5′-end of the CRISPR recognition portion comprises a modified sugar moiety.

72. The compound of any of claims 62-71, wherein the 10^{th} nucleoside from the 5′-end of the CRISPR recognition portion comprises a modified sugar moiety.

73. The compound of any of claims 62-72, wherein the 14^{th} nucleoside from the 5′-end of the CRISPR recognition portion comprises a modified sugar moiety.

74. The compound of any of claims 62-73, wherein the 1st nucleoside from the 3′-end of the CRISPR recognition portion comprises a modified sugar moiety.

75. The compound of any of claims 69-74, wherein at least one modified sugar moiety is selected from among: 2′-O-methyl, 2′-MOE, 2′-F, cEt, and LNA.

76. The compound of any of claims 69-74, wherein each modified sugar moiety is independently selected from among: 2′-O-methyl, 2′-MOE, 2′-F, cEt, and LNA.

77. The compound of claim 62, wherein the 3′-terminal nucleoside of the modified crRNA comprises a modified sugar moiety.

78. The compound of claim 77, wherein the 3′-terminal nucleoside comprises a linearly modified sugar moiety.

79. The compound of claim 78, wherein the 3′-terminal nucleoside comprises a 2′-modified sugar moiety.

80. The compound of claim 77, wherein the 3′-terminal nucleoside comprises a bicyclic sugar moiety.

81. The compound of claim 77, wherein the 3′-terminal nucleoside comprises a modified sugar moiety selected from among: 2′-O-methyl, 2′-MOE, 2′-F, cEt, and LNA.

82. The compound of any of claims 62-81, wherein the 1st nucleoside from the 5′-end of the target recognition portion comprises a modified sugar moiety.

83. The compound of any of claims 62-82, wherein the 8th nucleoside from the 5′-end of the target recognition portion comprises a modified sugar moiety.

84. The compound of any of claims 62-83, wherein the 9th nucleoside from the 5′-end of the target recognition portion comprises a modified sugar moiety.

85. The compound of any of claims 62-84, wherein one to five 3′-terminal nucleosides of the target recognition portion of the modified crRNA each comprise a modified sugar moiety.

86. The compound of claim 85, wherein the one to five 3′-terminal nucleosides of the target recognition portion of the modified crRNA each comprise the same modified sugar moiety.

87. The compound of claim 84 or 85, wherein the modified sugar moieties of the one to five 3′-terminal nucleosides of the target recognition portion are each independently selected from among 2′-O-methyl, 2′-MOE, 2′-F, cEt, and LNA.

88. The compound of any of claims 1-87, wherein the target recognition portion of the modified crRNA comprises at least one unmodified sugar moiety.

89. The compound of any of claims 1-88, wherein the CRISPR recognition portion of the modified crRNA comprises at least one unmodified sugar moiety.

90. The compound of any of claims 1-89, wherein the modified crRNA comprises at least one linker nucleoside that comprises an unmodified sugar moiety.

91. The compound of any of claims 1-90, wherein the compound consists of the modified crRNA.

92. The compound of any of claims 1-91, wherein the nucleobase sequence of the target recognition portion of the modified crRNA is at least 90% complementary to a target DNA or RNA.

93. The compound of claim 92, wherein the nucleobase sequence of the target recognition portion of the modified crRNA is 100% complementary to a target DNA or RNA.

94. The compound of any of claims 1-93, wherein the modified crRNA comprises a self-complementary region.

95. The compound of claim 94, wherein the self-complementary region is within the CRISPR recognition portion of the modified crRNA.

96. The compound of claim 94 or 95, wherein the self-complementary region can form a hairpin.

97. The compound of any of claims 94-96, wherein the self-complementary region comprises at least one modification that increases the stability of the self-complementary region.

98. The compound of any of claims 94-97, wherein the self-complementary region comprises at least one modification that increases the hybridization affinity of the self-complementary region.

99. The compound of any of claims 1-98, wherein the nucleobase sequence of the CRISPR recognition portion of the modified crRNA comprises at least 12 contiguous nucleobases of a sequence selected from Table A.

100. The compound of any of claims 1-98, wherein the nucleobase sequence of the CRISPR recognition portion of the modified crRNA consists of a sequence or a portion of a sequence selected from Table A.

101. The compound of any of claims 1-100, wherein the nucleobase sequence of the CRISPR recognition portion of the modified crRNA comprises the sequence XCXACX, wherein each X is, independently, a U nucleobase or a T nucleobase.

102. The compound of any of claims 1-100, wherein the nucleobase sequence of the CRISPR recognition portion of the modified crRNA comprises the sequence GXAGAX, wherein each X is, independently, a U nucleobase or a T nucleobase.

103. The compound of any of claims 1-100, wherein the nucleobase sequence of the CRISPR recognition portion of the modified crRNA comprises the sequence XCXACX and the sequence GXAGAX, wherein each X is, independently, a U nucleobase or a T nucleobase.

104. The compound of any of claim 1-90 or 92-103, wherein the compound comprises a conjugate group.

105. The compound of claim 104, wherein the conjugate group comprises GalNAc.

106. The compound of claim 104, wherein the conjugate group is lipophilic.

107. The compound of claim 106, wherein the conjugate group comprises a lipid.

108. A pharmaceutical composition comprising the compound of any of claims 1-107.

109. A method comprising contacting a cell with the compound or composition of any of claims 1-108.

110. The method of claim 109, wherein the cell expresses a Cpf1 nuclease.

111. A method comprising contacting a cell with the compound or composition of any of claims 1-108 and a plasmid that encodes a Cpf1 nuclease.

112. A method comprising contacting a cell with the compound or composition of any of claims 1-108 and an mRNA that encodes a Cpf1 nuclease.

113. The method of any of claims 109-112, wherein the modified crRNA is taken up by the cell in the absence of a transfection reagent.

114. The method of any of claims 109-113, wherein the cell is in an animal.

115. A method comprising administering to an animal the compound or composition of any of claims 1-108.

116. The method of claim 115, wherein the administration is subcutaneous.

117. The method of claim 115, wherein the administration is intrathecal.

118. The method of any of claims 115-117 comprising administering a plasmid that encodes a Cpf1 nuclease.

119. The method of any of claims 115-117 wherein the animal expresses a Cpf1 nuclease.

120. The method of claim 111 or 118, wherein the plasmid is delivered to cells within the animal via an adeno-associated virus (AAV).

121. The method of claim 111 or 118, wherein the plasmid is delivered to cells within the animal via a lentivirus.

122. The method of any of claims 109-121, wherein a target gene is edited.

123. The method of claim 122, wherein the modified crRNA is degraded in a cell after the target gene is edited in the cell.

124. The method of any of claim 110-112 or 118-123, wherein the Cpf1 nuclease does not exhibit nuclease activity in the absence of the modified crRNA.

125. The method of any of claims 109-124 comprising contacting the cell with a second compound that degrades or inhibits the activity or expression of the modified crRNA or a Cpf1 nuclease.

126. The method of claim 125, wherein the cell is contacted with the second compound after a target gene has been edited.

127. The method of claim 125 or 126, wherein the second compound comprises an oligonucleotide that is complementary to the modified crRNA.

128. The method of claim 125 or 126, wherein the second compound comprises a crRNA that targets a Cpf1 nuclease gene.

129. The method of claim 125 or 126, wherein the second compound comprises an oligonucleotide that is complementary to a Cpf1 transcript.

130. The method of claim 128 or 129, wherein the expression of the Cpf1 nuclease is inhibited.

131. The method of any of claims 114-130, wherein the animal is a human.

132. The method of any of claims 109-131, wherein editing of at least one off-target gene is reduced relative to editing the at least one off-target gene when unmodified crRNA or a compound comprising more than 45 nucleosides is used in place of the modified crRNA.

133. The method of any of claim 115 or 118-132, wherein the administration is intravitreal.

134. The method of any of claims 109-113, wherein the cell is a plant cell.

135. The method of any of claims 109-114, wherein the cell is a T-cell.

136. A method of treating a disease in an individual comprising administering the compound of any of claims 1-107 or the composition of claim 108 to the individual, thereby treating the disease in the individual.

137. Use of the compound of any of claims 1-107 or the composition of claim 108 for the treatment of a disease.

138. Use of the compound of any of claims 1-107 or the composition of claim 108 for preparation of a medicament.

139. A method of administering the compound of any of claims 1-107 or the composition of claim 108 to an animal, and harvesting an organ from the animal for transplantation into a human.

140. The compound of any of claims 90-107, wherein the 5′-terminal nucleoside comprises a cEt modified sugar moiety.

141. The compound of claim 140, wherein the 3′-end of the target recognition portion of the modified crRNA contains two contiguous phosphorothioate internucleoside linkages.

142. The compound of any of claims 140-141, wherein each internucleoside linkage of the CRISPR recognition portion of the modified crRNA is phosphorothioate.

143. The compound of any of claims 140-142, wherein the two 3′-terminal nucleosides of the target recognition portion of the modified crRNA each comprise a 2′-O-methyl modified sugar moiety.

144. The compound of any of claims 140-143, wherein the 1^{st} nucleoside from the 5′-end of the CRISPR recognition portion comprises an unmodified sugar moiety.

145. The compound of any of claims 140-144, wherein the modified crRNA comprises 30-38 unmodified sugar moieties.

146. The compound of claim 145, wherein the modified crRNA comprises 36 unmodified sugar moieties.

147. A pharmaceutical composition comprising the compound of any of claims 140-146.

148. A method comprising contacting a cell with the compound or composition of any of claims 140-147.

149. The method of claim 148, wherein the cell expresses a Cpf1 nuclease.

150. A method comprising contacting a cell with the compound or composition of any of claims 140-147 and a plasmid that encodes a Cpf1 nuclease.

151. A method comprising contacting a cell with the compound or composition of any of claims 140-147 and an mRNA that encodes a Cpf1 nuclease.

152. The method of any of claims 148-151, wherein the modified crRNA is taken up by the cell in the absence of a transfection reagent.

153. The method of any of claims 148-152, wherein the cell is in an animal.

154. A method comprising administering to an animal the compound or composition of any of claims 140-147.

155. The method of claim 154, wherein the administration is subcutaneous.

156. The method of claim 154, wherein the administration is intrathecal.

157. The method of any of claims 154-156 comprising administering a plasmid that encodes a Cpf1 nuclease.

158. The method of any of claims 154-156 wherein the animal expresses a Cpf1 nuclease.

159. The method of claim 150 or 157, wherein the plasmid is delivered to cells within the animal via an adeno-associated virus (AAV).

160. The method of claim 150 or 157, wherein the plasmid is delivered to cells within the animal via a lentivirus.

161. The method of any of claims 148-160, wherein a target gene is edited.

162. The method of claim 161, wherein the modified crRNA is degraded in a cell after the target gene is edited in the cell.

163. The method of any of claim 149-151 or 157-162, wherein the Cpf1 nuclease does not exhibit nuclease activity in the absence of the modified crRNA.

164. The method of any of claims 148-163 comprising contacting the cell with a second compound that degrades or inhibits the activity or expression of the modified crRNA or a Cpf1 nuclease.

165. The method of claim 164, wherein the cell is contacted with the second compound after a target gene has been edited.

166. The method of claim 164 or 165, wherein the second compound comprises an oligonucleotide that is complementary to the modified crRNA.

167. The method of claim 164 or 165, wherein the second compound comprises a crRNA that targets a Cpf1 nuclease gene.

168. The method of claim 164 or 165, wherein the second compound comprises an oligonucleotide that is complementary to a Cpf1 transcript.

169. The method of claim 167 or 168, wherein the expression of the Cpf1 nuclease is inhibited.

170. The method of any of claims 153-169, wherein the animal is a human.

171. The method of any of claims 148-170, wherein editing of at least one off-target gene is reduced relative to editing the at least one off-target gene when unmodified crRNA or a compound comprising more than 45 nucleosides is used in place of the modified crRNA.

172. The method of any of claim 154 or 157-171, wherein the administration is intravitreal.

173. The method of any of claims 148-152, wherein the cell is a plant cell.

174. The method of any of claims 148-153, wherein the cell is a T-cell.

175. A method of treating a disease in an individual comprising administering the compound of any of claims 140-146 or the composition of claim 147 to the individual.

176. A method of treating a disease in an individual comprising administering the compound of any of claims 140-146 or the composition of claim 147 to the individual, thereby treating the disease in the individual.

177. Use of the compound of any of claims 140-146 or the composition of claim 147 for the treatment of a disease.

178. Use of the compound of any of claims 140-146 or the composition of claim 147 for preparation of a medicament.

179. A method of administering the compound of any of claims 140-146 or the composition of claim 147 to an animal, and harvesting an organ from the animal for transplantation into a human.

180. The compound of any of claim 91-107 or 140-146, wherein at least one modified nucleoside of the modified crRNA is a 2′-deoxynucleoside.

181. The compound of any of claim 91-107 or 140-146, wherein at least one modified nucleoside of the modified crRNA comprises a linearly modified sugar moiety having a 2′-H substitution.

182. The compound of any of claim 91-107 or 140-146, wherein at least one modified nucleoside of the modified crRNA comprises a modified 2′-H(H) sugar moiety as found in naturally occurring DNA.

183. The compound of any of claim 91-107, 140-146, or 180-182, wherein the modified crRNA consists of 40 linked nucleosides.

184. The compound of any of claim 91-107, 140-146, or 180-182, wherein the modified crRNA consists of 43 linked nucleosides.

185. The compound of any of claim 91-107, 140-146, or 180-182, wherein the modified crRNA consists of 45 linked nucleosides.

186. The compound of any of claim 91-107, 140-146, or 180-185, wherein the target recognition portion of the modified crRNA is at least 90% complementary to a DNMT1 nucleic acid.

187. The compound of claim 186, wherein the target recognition portion is 100% complementary to a DNMT1 nucleic acid.

188. The compound of claim 186 or 187, wherein the DNMT1 nucleic acid is a deoxyribonucleic acid.

189. The compound of claim 188, wherein the DNMT1 nucleic acid is a human deoxyribonucleic acid.

190. The compound of any of claim 91-107, 140-146, or 180-185, wherein the target recognition portion of the modified crRNA is at least 90% complementary to a LDLR nucleic acid.

191. The compound of claim 190, wherein the target recognition portion is 100% complementary to a LDLR nucleic acid. The compound of claim 190 or 191, wherein the LDLR nucleic acid is a deoxyribonucleic acid.

192. The compound of claim 191, wherein the LDLR nucleic acid is a human deoxyribonucleic acid.

193. The compound of any of claim 91-107, 140-146, or 180-192, wherein the two 3′-terminal nucleosides of the modified crRNA comprise independently selected modified sugar moieities.

194. The compound of any of claim 91-107, 140-146, or 180-192, wherein the three 3′-terminal nucleosides of the modified crRNA comprise independently selected modified sugar moieities.

195. The compound of any of claim 91-107, 140-146, or 180-192, wherein the four 3′-terminal nucleosides of the modified crRNA comprise independently selected modified sugar moieities.

196. The compound of any of claim 91-107, 140-146, or 180-192, wherein the five 3′-terminal nucleosides of the modified crRNA comprise independently selected modified sugar moieities.

197. The compound of any of claim 77 or 193-196, wherein the modified sugar moieties of the 3′-terminal modified nucleosides are selected from among 2′-H(H), 2′-O-methyl, 2′-F, cEt, and LNA modified sugar moieties.

198. The compound of claim 197, wherein the modified sugar moieties of the 3′-terminal modified nucleosides are selected from among 2′-H(H), 2′-O-methyl, and cEt modified sugar moieties.

199. The compound of claim 197, wherein the modified sugar moieties of the 3′-terminal modified nucleosides are selected from among 2′-H(H) and 2′-O-methyl modified sugar moieties.

200. The compound of claim 197, wherein the modified sugar moieties of the 3′-terminal modified nucleosides are selected from among cEt and LNA modified sugar moieties.

201. The compound of any of claim 82-107, 140-146, or 180-200, wherein the 1st nucleoside from the 5′-end of the target recognition portion comprises a 2′-H(H) or 2′-F modified sugar moiety.

202. The compound of any of claim 82-107, 140-146, or 180-201, wherein the 8th nucleoside from the 5′-end of the target recognition portion comprises a 2′-H(H) or 2′-F modified sugar moiety.

203. The compound of any of claim 82-107, 140-146, or 180-202, wherein the 9th nucleoside from the 5′-end of the target recognition portion comprises a 2′-H(H) or 2′-F modified sugar moiety.

204. The compound of any of claim 91-107, 140-146, or 180-203, wherein the modified crRNA comprises at least three of the following features:
a. two linker nucleosides linked to the 5′-end of the CRISPR recognition portion of the modified crRNA;
b. 1^{st}, 8^{th}, and/or 9^{th} nucleoside from the 5′-end of the target recognition portion of the modified crRNA independently comprising 2′-F or 2′-H(H) modified sugar moiety;
c. at least one terminal phosphorothioate internucleoside linkage at each of the 3′ and 5′ termini of the modified crRNA
d. each nucleoside of the CRISPR recognition portion comprising an unmodified sugar moiety
e. one to five 3′-terminal nucleosides of the modified crRNA comprising independently selected modified sugar moieities

205. The compound of any of claim 1-107, 140-146, or 180-204, wherein the modified crRNA is a salt.

206. A pharmaceutical composition comprising the compound of any of claims 180-205.

207. The pharmaceutical composition of any of claim 108, 147, or 206, wherein the pharmaceutical composition comprises a ribonucleoprotein complex.

208. The pharmaceutical composition of claim 207, wherein the ribonucleoprotein complex comprises a Cpf1 nuclease and the compound comprising the modified crRNA.

209. A method comprising contacting a cell with the compound or composition of any of claims 180-208.

210. A method comprising contacting a cell with the compound or composition of any of claims 180-207, wherein the cell expresses a Cpf1 nuclease.

211. A method comprising contacting a cell with the compound or composition of any of claims 180-207 and a plasmid that encodes a Cpf1 nuclease.

212. A method comprising contacting a cell with the compound or composition of any of claims 180-207 and an mRNA that encodes a Cpf1 nuclease.

213. The method of any of claims 209-212, wherein the modified crRNA is taken up by the cell in the absence of a transfection reagent.

214. The method of any of claims 209-213, wherein the cell is in an animal.

215. A method comprising administering to an animal the compound or composition of any of claims 180-208.

216. The method of claim 215, wherein the administration is subcutaneous.

217. The method of claim 215, wherein the administration is intrathecal.

218. The method of any of claims 215-217 comprising administering a plasmid that encodes a Cpf1 nuclease.

219. The method of any of claims 215-217 wherein the animal expresses a Cpf1 nuclease.

220. The method of claim 211 or 218, wherein the plasmid is delivered to cells within the animal via an adeno-associated virus (AAV).

221. The method of claim 211 or 218, wherein the plasmid is delivered to cells within the animal via a lentivirus.

222. The method of any of claims 209-221, wherein a target gene is edited.

223. The method of claim 222, wherein the modified crRNA is degraded in a cell after the target gene is edited in the cell.

224. The method of any of claim 210-212 or 215-223, wherein the Cpf1 nuclease does not exhibit nuclease activity in the absence of the modified crRNA.

225. The method of any of claims 209-224 comprising contacting the cell with a second compound that degrades or inhibits the activity or expression of the modified crRNA or a Cpf1 nuclease.

226. The method of claim 225, wherein the cell is contacted with the second compound after a target gene has been edited.

227. The method of claim 225 or 226, wherein the second compound comprises an oligonucleotide that is complementary to the modified crRNA.

228. The method of claim 225 or 226, wherein the second compound comprises a crRNA that targets a Cpf1 nuclease gene.

229. The method of claim 225 or 226, wherein the second compound comprises an oligonucleotide that is complementary to a Cpf1 transcript.

230. The method of claim 228 or 229, wherein the expression of the Cpf1 nuclease is inhibited.

231. The method of any of claims 214-230, wherein the animal is a human.

232. The method of any of claims 209-231, wherein editing of at least one off-target gene is reduced relative to editing the at least one off-target gene when unmodified crRNA or a compound comprising more than 45 nucleosides is used in place of the modified crRNA.

233. The method of any of claim 215 or 218-232, wherein the administration is intravitreal.

234. The method of any of claims 209-213, wherein the cell is a plant cell.

235. The method of any of claims 209-214, wherein the cell is a T-cell.

236. A method of treating a disease in an individual comprising administering the compound of any of claims 180-205 or the composition of any of claims 206-208 to the individual.

237. A method of treating a disease in an individual comprising administering the compound of any of claims 180-205 or the composition any of claims 206-208 to the individual, thereby treating the disease in the individual.

238. Use of the compound of any of claims 180-205 or the composition of any of claims 206-208 for the treatment of a disease.

239. Use of the compound of any of claims 180-205 or the composition of any of claims 206-208 for preparation of a medicament.

240. A method of administering the compound of any of claims 180-205 or the composition of any of claims 206-208 to an animal, and harvesting an organ from the animal for transplantation into a human.

241. The compound of any of claim 1-107, 140-146, or 180-205, wherein the CRISPR recognition portion of the modified crRNA comprises at least one modified sugar moiety.

242. The compound of claim 241, wherein the at least one modified sugar moiety of the CRISPR recognition portion is a linearly modified sugar moiety.

243. The compound of claim 241, wherein the at least one modified sugar moiety of the CRISPR recognition portion is a bicyclic sugar moiety.

244. The compound of claim 243, wherein the bicyclic sugar moiety is cEt or LNA.

245. The compound of claim 243, wherein the bicyclic sugar moiety is cEt.

246. The compound of any of claims 241-245, wherein the 2nd nucleoside from the 3′-end of the CRISPR recognition portion comprises the at least one modified sugar moiety.

247. The compound of any of claims 241-245, wherein the 3rd nucleoside from the 3′-end of the CRISPR recognition portion comprises the at least one modified sugar moiety.

248. The compound of any of claims 241-245, wherein the 4th nucleoside from the 3′-end of the CRISPR recognition portion comprises the at least one modified sugar moiety.

249. The compound of any of claims 241-245, wherein the 5th nucleoside from the 3′-end of the CRISPR recognition portion comprises the at least one modified sugar moiety.

250. The compound of any of claims 241-245, wherein the 6th nucleoside from the 3′-end of the CRISPR recognition portion comprises the at least one modified sugar moiety.

251. The compound of any of claims 241-245, wherein the 7th nucleoside from the 3′-end of the CRISPR recognition portion comprises the at least one modified sugar moiety.

252. The compound of any of claims 241-245, wherein the 8th nucleoside from the 3′-end of the CRISPR recognition portion comprises the at least one modified sugar moiety.

253. The compound of any of claims 241-245, wherein the 9th nucleoside from the 3′-end of the CRISPR recognition portion comprises the at least one modified sugar moiety.

254. The compound of any of claims 241-245, wherein the 11th nucleoside from the 3′-end of the CRISPR recognition portion comprises the at least one modified sugar moiety.

255. The compound of any of claims 241-245, wherein the 12th nucleoside from the 3′-end of the CRISPR recognition portion comprises the at least one modified sugar moiety.

256. The compound of any of claims 241-245, wherein the 13th nucleoside from the 3′-end of the CRISPR recognition portion comprises the at least one modified sugar moiety.

257. The compound of any of claims 241-245, wherein the 18^{th} nucleoside from the 3′-end of the CRISPR recognition portion comprises the at least one modified sugar moiety.

258. The compound of any of claims 241-245, wherein the 11^{th} and 12^{th} nucleosides from the 3′-end of the CRISPR recognition portion each comprise a modified sugar moiety.

259. The compound of any of claims 241-258, wherein the 1^{st} nucleoside from the 3′-end of the CRISPR recognition portion comprises an unmodified sugar moiety.

260. The compound of any of claims 241-259, wherein the 10^{th} nucleoside from the 3′-end of the CRISPR recognition portion comprises an unmodified sugar moiety.

261. The compound of any of claims 241-260, wherein the 14^{th} nucleoside from the 3′-end of the CRISPR recognition portion comprises an unmodified sugar moiety.

262. The compound of any of claims 241-261, wherein the 15^{th} nucleoside from the 3′-end of the CRISPR recognition portion comprises an unmodified sugar moiety.

263. The compound of any of claims 241-262, wherein the 16^{th} nucleoside from the 3′-end of the CRISPR recognition portion comprises an unmodified sugar moiety.

264. The compound of any of claims 241-263, wherein the 17^{th} nucleoside from the 3′-end of the CRISPR recognition portion comprises an unmodified sugar moiety.

265. The compound of any of claims 241-264, wherein the 1st nucleoside from the 5′-end of the CRISPR recognition portion comprises an unmodified sugar moiety.

266. The compound of any of claims 241-265, wherein the 2nd nucleoside from the 5′-end of the CRISPR recognition portion comprises an unmodified sugar moiety.

267. The compound of any of claims 241-266, wherein the 3rd nucleoside from the 5′-end of the CRISPR recognition portion comprises an unmodified sugar moiety.

268. The compound of any of claim 1-107, 140-146, 180-205, or 241-267, wherein the 14^{th} nucleoside from the 5′-end of the target recognition portion comprises a modified sugar moiety.

269. The compound of any of claim 1-107, 140-146, 180-205, or 241-268, wherein the 15^{th} nucleoside from the 5′-end of the target recognition portion comprises a modified sugar moiety.

270. The compound of any of claim 1-107, 140-146, 180-205, or 241-269, wherein the 16^{th} nucleoside from the 5′-end of the target recognition portion comprises a modified sugar moiety.

271. The compound of any of claims 268-270, wherein each modified sugar moiety at position 14, 15, and/or 16 from the 5′-end of the target recognition portion is a linearly modified sugar moiety.

272. The compound of claim 271, wherein each modified sugar moiety at position 14, 15, and/or 16 from the 5′-end of the target recognition portion is independently selected from 2′-H(H) and 2′-F modified sugar moieties.

273. The compound of claim 272, wherein each modified sugar moiety at position 14, 15, and/or 16 from the 5′-end of the target recognition portion is a 2′-H(H) modified sugar moiety.

274. The compound of any of claim 1-107, 140-146, 180-205, or 241-273, wherein the modified crRNA comprises at least three of the following features:
(a) two linker nucleosides linked to the 5′-end of the CRISPR recognition portion of the modified crRNA;
(b) 1^{st}, 8^{th}, and/or 9^{th} nucleoside from the 5′-end of the target recognition portion of the modified crRNA independently comprising 2′-F or 2′-H(H) modified sugar moiety;
(c) at least one terminal phosphorothioate internucleoside linkage at each of the 3′ and 5′ termini of the modified crRNA
(d) at least one nucleoside at position 5, 6, 7, 8, 11, or 12 from the 3′-end of the CRISPR recognition portion comprises a modified sugar moiety
(e) one to five 3′-terminal nucleosides of the modified crRNA comprising independently selected modified sugar moieities

275. The compound of claim 274, wherein the modified crRNA comprises features (a), (c), and (e).

276. The compound of claim 274, wherein the modified crRNA comprises features (a), (c), and (d).

277. The compound of claim 274, wherein the modified crRNA comprises features (a), (b), and (c).

278. The compound of claim 274, wherein the modified crRNA comprises features (a), (b), (c), and (e).

279. The compound of claim 274, wherein the modified crRNA comprises features (a), (c), (d), and (e).

280. The compound of claim 274, wherein the modified crRNA comprises features (a), (b), (c), (d), and (e).

281. A pharmaceutical composition comprising the compound of any of claims 241-280.

282. The pharmaceutical composition of claim 281, wherein the pharmaceutical composition comprises a ribonucleoprotein complex.

283. The pharmaceutical composition of claim 282, wherein the ribonucleoprotein complex comprises a Cpf1 nuclease and the compound comprising the modified crRNA.

284. A method comprising contacting a cell with the compound or composition of any of claims 241-283.

285. A method comprising contacting a cell with the compound or composition of any of claims 241-283, wherein the cell expresses a Cpf1 nuclease.

286. A method comprising contacting a cell with the compound or composition of any of claims 241-283 and a plasmid that encodes a Cpf1 nuclease.

287. A method comprising contacting a cell with the compound or composition of any of claims 241-283 and an mRNA that encodes a Cpf1 nuclease.

288. The method of any of claims 284-287, wherein the modified crRNA is taken up by the cell in the absence of a transfection reagent.

289. The method of any of claims 284-288, wherein the cell is in an animal.

290. A method comprising administering to an animal the compound or composition of any of claims 241-283.

291. The method of claim 290, wherein the administration is subcutaneous.

292. The method of claim 290, wherein the administration is intrathecal.

293. The method of any of claims 290-292 comprising administering a plasmid that encodes a Cpf1 nuclease.

294. The method of any of claims 290-292 wherein the animal expresses a Cpf1 nuclease.

295. The method of claim 286 or 293, wherein the plasmid is delivered to cells within the animal via an adeno-associated virus (AAV).

296. The method of claim 286 or 293, wherein the plasmid is delivered to cells within the animal via a lentivirus.

297. The method of any of claims 284-296, wherein a target gene is edited.

298. The method of claim 297, wherein the modified crRNA is degraded in a cell after the target gene is edited in the cell.

299. The method of any of claim 285-287 or 293-298, wherein the Cpf1 nuclease does not exhibit nuclease activity in the absence of the modified crRNA.

300. The method of any of claims 284-299 comprising contacting the cell with a second compound that degrades or inhibits the activity or expression of the modified crRNA or a Cpf1 nuclease.

301. The method of claim 300, wherein the cell is contacted with the second compound after a target gene has been edited.

302. The method of claim 300 or 301, wherein the second compound comprises an oligonucleotide that is complementary to the modified crRNA.

303. The method of claim 300 or 301, wherein the second compound comprises a crRNA that targets a Cpf1 nuclease gene.

304. The method of claim 300 or 301, wherein the second compound comprises an oligonucleotide that is complementary to a Cpf1 transcript.

305. The method of claim 303 or 304, wherein the expression of the Cpf1 nuclease is inhibited.

306. The method of any of claims 289-305, wherein the animal is a human.

307. The method of any of claims 284-306, wherein editing of at least one off-target gene is reduced relative to editing the at least one off-target gene when unmodified crRNA or a compound comprising more than 45 nucleosides is used in place of the modified crRNA.

308. The method of any of claim 290 or 293-297, wherein the administration is intravitreal.

309. The method of any of claims 284-288, wherein the cell is a plant cell.

310. The method of any of claims 284-289, wherein the cell is a T-cell.

311. A method of treating a disease in an individual comprising administering the compound of any of claims 241-280 or the composition of any of claims 281-283 to the individual.

312. A method of treating a disease in an individual comprising administering the compound of any of claims 241-280 or the composition any of claims 281-283 to the individual, thereby treating the disease in the individual.

313. Use of the compound of any of claims 241-280 or the composition of any of claims 281-283 for the treatment of a disease.

314. Use of the compound of any of claims 241-280 or the composition of any of claims 281-283 for preparation of a medicament.

315. A method of administering the compound of any of claims 241-280 or the composition of any of claims 281-283 to an animal, and harvesting an organ from the animal for transplantation into a human.

316. The pharmaceutical composition of any of claim 108, 147, 206, or 281 comprising a liposome or lipid nanoparticle.

317. The pharmaceutical composition of any of claim 108, 147, 206, 281, or 316 comprising mRNA that encodes a Cpf1 nuclease.

318. The pharmaceutical composition of claim 317, wherein the compound comprising the modified crRNA and the mRNA encoding a Cpf1 nuclease are contained with a liposome or lipid nanoparticle.

319. The method of any of claim 212-214, 151-153, 212-214, or 287-289, wherein the mRNA encoding the Cpf1 nuclease and the compound comprising the modified crRNA are contained within a liposome or lipid nanoparticle.

320. A method of treating a disease in an individual comprising administering the pharmaceutical composition of any of claims 316-318 to the individual.

321. A method of treating a disease in an individual comprising administering the pharmaceutical composition of any of claims 316-318 to the individual, thereby treating the disease in the individual.
